(19) United States
(12) Patent Application Publication
(10) Pub. No.: US 2024/0390522 A1
(43) Pub. Date: Nov. 28, 2024

(54) GENE THERAPY FOR DUCHENNE MUSCULAR DYSTROPHY

(71) Applicant: University of Florida Research Foundation, Incorporated, Gainesville, FL (US)

(72) Inventor: Hugh Lee Sweeney, Gainesville, FL (US)

(73) Assignee: University of Florida Research Foundation, Incorporated, Gainesville, FL (US)

(21) Appl. No.: 18/696,085

(22) PCT Filed: Sep. 28, 2022
(86) PCT No.: PCT/US2022/077199

§ 371 Date: Mar. 27, 2024

Related U.S. Application Data
(60) Provisional application No. 63/303,499, filed on Jan. 26, 2022.
(60) Provisional application No. 63/249,511, filed on Sep. 28, 2021.

(51) Int. Cl. A61K 48/00; A61P 21/00; C07K 14/47; C12N 15/86

(52) U.S. Cl. CPC A61K 48/0058; A61P 21/00; C07K 14/4708; C12N 15/86; C12N 2750/14143; C12N 2830/008

(57) ABSTRACT

The disclosure provides compositions and methods for producing micro-dystrophin proteins, and the use thereof (e.g., in gene therapy). The disclosure also provides skeletal muscle-specific promoters and the use thereof (e.g., in gene therapy). The disclosure further provides catheter-based methods of delivering gene therapy vectors to skeletal muscle and/or cardiac muscle.

### CROSS-REFERENCE TO RELATED APPLICATIONS

[0001] This application claims the benefit of the filing dates of U.S. Provisional Application No. 63/249,511, filed Sep. 28, 2021 and U.S. Provisional Application No. 63/303,499, filed Jan. 26, 2022, the entire contents of each of which are incorporated by reference.

### BACKGROUND

[0002] Duchenne muscular dystrophy (DMD) is a rare, X chromosome-linked disorder characterized by progressive muscle degeneration and weakness. DMD is caused by mutations in the gene encoding the dystrophin protein, which is the largest known gene. The full-length dystrophin protein, as expressed in skeletal muscle, smooth muscle, and cardiomyocytes, is 3685 amino acids and has a molecular weight of 427 kD. The severe Duchenne phenotype is generally associated with the loss of full-length dystrophin protein from skeletal and cardiac muscle, which leads to debilitating muscle degeneration and, ultimately, heart failure. A large number of different dystrophin gene mutations have been described, many of them resulting in either the severe DMD or the milder Becker Muscular Dystrophy.

[0003] Utrophin protein is highly related to dystrophin and can substitute for dystrophin's function in mammals. Normally, utrophin is expressed highly in developing muscle, and in mature muscle is enriched at the neuromuscular junction. As the myofiber matures, utrophin levels are decreased and dystrophin is the protein expressed in the mature myofiber.

[0004] The multifaceted pathologies associated with DMD represent major challenges to the development and clinical implementation of effective therapeutics for the disease. There are several therapeutic strategies being pursued for the treatment of DMD. The most active area of research is in “gene replacement” strategies (see Oshima et al. (2009) J. Am. Soc. Gene Ther. 17:73-80; Liu et al. (2005) Mol. Ther. 11:245-56; Lai et al. (2006) Hum Gene Ther. 17:1036-42; Odom et al. (2008) Mol. Ther. 16:1539-45). This approach involves delivering a functional copy of the dystrophin gene to patients using a viral delivery vector, typically adeno-associated virus (AAV), which can deliver a micro-dystrophin construct to all striated muscles. The large size of the dystrophin gene makes it incompatible with the limited carrying capacity of common viral vectors, however. This necessitates the use of a “micro-dystrophin” gene, in which most of the repetitive central portion of the gene is removed to leave only the minimally functional protein. It is not clear, however, that expression of “micro-dystrophin” is sufficient for clinical benefit. In addition, this approach suffers from the possibility of random gene integration into the patient genome, which could lead to insertional mutagenesis, and the potential for immune reactions against the delivery vector. Thus, a number of significant drawbacks remain with micro-dystrophin gene therapies. Accordingly, a need exists for alternative gene therapies for treating DMD.

### SUMMARY

[0005] The present disclosure provides chimeric proteins that comprise domains from dystrophin and utrophin proteins. These chimeric proteins are useful for treating subjects suffering from skeletal muscle disorders such as DMD. The present disclosure also provides recombinant nucleic acids encoding any of these chimeric proteins. In addition, this disclosure provides rAAV vectors comprising any of these nucleic acids, and rAAV particles comprising these rAAV vectors. In some aspects, the present disclosure provides cells and compositions comprising any of the disclosed chimeric proteins, recombinant nucleic acids, rAAV vectors, or rAAV particles. In some aspects, the disclosure provides methods of treatment of DMD and other skeletal muscle disorders.

[0006] Accordingly, in some aspects, the present disclosure provides a recombinant nucleic acid comprising a nucleotide sequence encoding a chimeric protein comprising a dystrophin region (or domain) and a utrophin region (or domain). In some embodiments, the chimeric protein comprises a carboxy-terminal (also referred to herein as “C-terminal” or “C-terminus”) region of dystrophin coupled to an amino-terminal (also referred to herein as “N-terminal” or “N-terminus”) region of utrophin. In one aspect, the present disclosure provides a recombinant nucleic acid comprising a nucleotide sequence encoding a micro-dystrophin protein comprising a utrophin N-terminus. In some embodiments, the micro-dystrophin protein comprises the region of utrophin from the N-terminus to spectrin-like repeat 1. In some embodiments, the micro-dystrophin protein comprises the region of utrophin from the N-terminus to spectrin-like repeat 2. In some embodiments, the micro-dystrophin protein comprises the region of utrophin from the N-terminus to spectrin-like repeat 3. In some embodiments, the micro-dystrophin protein comprises the region of utrophin from the N-terminus to hinge 2.

[0007] In some embodiments, the recombinant nucleic acid comprises a micro-dystrophin protein-encoding nucleotide sequence that is at least 80% identical to the nucleotide sequence of any one of SEQ ID NOs: 7-12 and 22-39. In some embodiments, this recombinant nucleic acid comprises a nucleotide sequence having 100% identity with the nucleotide sequence of any one of SEQ ID NOs: 7-12 and 22-39. In some embodiments, the recombinant nucleic acid comprises a nucleotide sequence encoding the micro-dystrophin protein that comprises a nucleotide sequence that is at least 80% identical to the nucleotide sequence of any one of SEQ ID Nos. 7-12 and 22-39.

[0008] In some embodiments, the recombinant nucleic acid comprises a nucleotide sequence that is at least 80% identical to the nucleotide sequence of any one of SEQ ID NOs: 85-92, 126-131, and 133-134. In some embodiments, the recombinant nucleic acid comprises a nucleotide sequence having 100% identity with the nucleotide sequence of any one of SEQ ID NOs: 85-92, 126-131, and 133-134. In some embodiments, the recombinant nucleic acid comprises a nucleotide sequence that is at least 80% identical to the nucleotide sequence of any one of SEQ ID NOs: 135-148. In some embodiments, the recombinant nucleic acid comprises a nucleotide sequence having 100% identity with the nucleotide sequence of any one of SEQ ID NOs: 135-148. In some embodiments, the recombinant nucleic acid comprises a nucleotide sequence that is at least 80% identical to the nucleotide sequence of any one of SEQ ID NOs: 166-185. In some embodiments, the recombinant nucleic acid comprises a nucleotide sequence having 100% identity with the nucleotide sequence of any one of SEQ ID NOs: 166-185.

[0009] In one aspect, the present disclosure provides a recombinant nucleic acid encoding a chimeric protein that comprises, or consists of, a nucleotide sequence encoding a micro-dystrophin protein comprising: an amino-terminal actin-binding domain, hinge domain 1, spectrin-like repeat 1, spectrin-like repeat 17, spectrin-like repeat 18, and spectrin-like repeat 19, and wherein the micro-dystrophin protein does not contain spectrin-like repeat 2 and/or spectrin-like repeat 3 of dystrophin. In some embodiments, the micro-dystrophin protein further comprises one or more of: spectrin-like repeat 24, hinge domain 4, and dystroglycan binding site of dystrophin. In some embodiments, the micro-dystrophin protein further comprises one or more syntrophin binding domains of dystrophin. In some embodiments, the micro-dystrophin protein further comprises one or more coiled coil domains of dystrophin. In some embodiments, the spectrin-like repeat 1 is directly coupled to the spectrin-like repeat 17. In some embodiments, the spectrin-like repeat 19 is directly coupled to spectrin-like repeat 24. In some embodiments, the spectrin-like repeat 19 is directly coupled to hinge domain 4.

[0010] In exemplary embodiments, provided herein is a chimeric protein that contains a utrophin N-terminal domain ending at utrophin spectrin-like repeat 2 connected to a dystrophin C-terminal domain containing spectrin-like repeat 23 through the C-terminus. Also provided herein is a chimeric protein that consists of a utrophin N-terminal domain ending at utrophin spectrin-like repeat 2 connected to a dystrophin C-terminal domain containing spectrin-like repeat 23 through the C-terminus.

[0011] In some aspects, the present disclosure provides a recombinant nucleic acid encoding a chimeric protein that comprises a nucleotide sequence encoding a micro-dystrophin protein comprising: an amino-terminal actin-binding domain, hinge domain 1, spectrin-like repeat 1, spectrin-like repeat 2, spectrin-like repeat 16, and spectrin-like repeat 17, and wherein the micro-dystrophin protein does not contain spectrin-like repeat 3 of dystrophin.

[0012] In some embodiments, the micro-dystrophin protein further comprises one or more of: spectrin-like repeat 23, spectrin-like repeat 24, hinge domain 4, and dystroglycan binding site of dystrophin. In some embodiments, the micro-dystrophin protein further comprises one or more syntrophin binding domains of dystrophin. In some embodiments, the micro-dystrophin protein further comprises one or more coiled coil domains of dystrophin.

[0013] In some embodiments, the spectrin-like repeat 2 is directly coupled to spectrin-like repeat 16. In some embodiments, the spectrin-like repeat 17 is directly coupled to spectrin-like repeat 24. In some embodiments, the spectrin-like repeat 17 is directly coupled to hinge domain 4.

[0014] In some embodiments, the micro-dystrophin protein of the chimeric protein comprises the region of dystrophin from spectrin-like repeat 24 to the C-terminus. In some embodiments, the micro-dystrophin protein comprises the region of dystrophin from spectrin-like repeat 24 to the end of the proline rich region following the first coiled coil domain. In some embodiments, the micro-dystrophin protein comprises the region of dystrophin from hinge domain 4 to the C-terminus.

[0015] In some embodiments, the micro-dystrophin protein of the chimeric protein comprises, or consists of, the region of dystrophin from hinge domain 4 to the end of the proline rich region following the first coiled coil domain. In some embodiments, the micro-dystrophin protein comprises the region of dystrophin from hinge domain 4 to the end of the second syntrophin binding domain.

[0016] In some embodiments, any of the disclosed recombinant nucleic acids encoding the chimeric protein is less than 5 kb in length.

[0017] In some embodiments, a promoter is operably linked to the nucleotide sequence encoding the micro-dystrophin protein. In some embodiments, the promoter is a cardiac-specific promoter. In some embodiments, the cardiac-specific promoter is a cardiac troponin T (cTnT) promoter. In some embodiments, the promoter is a skeletal muscle-specific promoter. In some embodiments, the skeletal muscle-specific promoter is a skeletal muscle alpha-actin promoter. In some embodiments, the skeletal muscle-specific promoter comprises a nucleotide sequence that is at least 80% identical to SEQ ID NO: 78 or SEQ ID NO: 80.

[0018] In some embodiments, the present disclosure provides a recombinant nucleic acid comprising a nucleotide sequence encoding a micro-dystrophin protein that comprises an amino acid sequence that is at least 80% identical to the amino acid sequence of any one of SEQ ID Nos. 1-6 and 13-21.

[0019] In various embodiments, the recombinant nucleic acid comprising a nucleotide sequence encoding a micro-dystrophin protein as described herein also comprises a nucleotide sequence encoding a region of a utrophin protein. In some embodiments, a promoter is operably linked to the nucleotide sequence encoding the region of utrophin protein. In some embodiments, the micro-dystrophin protein comprises one or more utrophin protein domains.

[0020] In some embodiments, the chimeric protein comprises an N-terminal domain (or N-terminus) containing a region of utrophin from the N-terminus to spectrin-like repeat 1; the region of utrophin from the N-terminus to spectrin-like repeat 2; the region of utrophin from the N-terminus to spectrin-like repeat 3; or the region of utrophin from the N-terminus to hinge 2. In some embodiments, the utrophin domain consists of the region of utrophin from the N-terminus to spectrin-like repeat 1; the region of utrophin from the N-terminus to spectrin-like repeat 2; the region of utrophin from the N-terminus to spectrin-like repeat 3; or the region of utrophin from the N-terminus to hinge 2.

[0021] In some embodiments, the present disclosure provides a micro-dystrophin protein encoded by a recombinant nucleic acid of the disclosure. In some embodiments, the present disclosure provides a chimeric protein comprising a micro-dystrophin protein region and a utrophin protein region, wherein the chimeric protein is encoded by a recombinant nucleic acid as provided in the disclosure.

[0022] In one aspect, the present disclosure provides a skeletal muscle-specific promoter. In one aspect, the present disclosure provides an isolated nucleic acid comprising a nucleotide sequence that is at least 80% identical to the nucleotide sequence of SEQ ID NO: 78 or SEQ ID NO: 80. In some embodiments, this nucleotide sequence is operably linked to a nucleotide sequence that is at least 80% identical to the nucleotide sequence of any one of SEQ ID Nos. 7-12 and 22-39.

[0023] In some embodiments, the nucleotide sequence that is at least 80% identical to the nucleotide sequence of SEQ ID NO: 78 or SEQ ID NO: 80 is operably linked to a nucleotide sequence that encodes a micro-dystrophin protein that comprises an amino acid sequence that is at least 80% identical to the amino acid sequence of any one of SEQ ID Nos. 1-6 and 13-21.

[0024] In one aspect, the present disclosure provides a recombinant adeno-associated virus (rAAV) vector comprising a recombinant nucleic acid or isolated nucleic acid of the disclosure.

[0025] In one aspect, the present disclosure provides an rAAV particle comprising a rAAV vector of the disclosure encapsidated in an AAV capsid. In some embodiments, the AAV capsid comprises a capsid protein derived from AAV1, AAV2, AAV3, AAV6, AAV7, AAV8, AAVrh.74, AAVrh.10, AAV2/6 or AAV9 serotypes. In one aspect, the present disclosure provides compositions comprising one or more of these rAAV particles.

[0026] In one aspect, the present disclosure provides a method of treating a skeletal muscle disorder in a subject in need thereof, comprising administering to the subject a recombinant or isolated nucleic acid of the disclosure, an rAAV particle of the disclosure, or a composition of the disclosure.

[0027] In one aspect, the present disclosure provides a method of treating Duchenne muscular dystrophy (DMD) in a subject in need thereof, comprising administering to the subject a recombinant or isolated nucleic acid of the disclosure, an rAAV particle of the disclosure, or a composition of the disclosure.

[0028] In one aspect, the present disclosure provides a method of treating Duchenne muscular dystrophy (DMD) in a subject in need thereof, the method comprising delivering to the subject a first recombinant adeno-associated virus (rAAV) particle comprising a nucleotide sequence encoding a first micro-dystrophin protein to cardiac muscle (e.g., optimized for cardiac muscle) and a second rAAV particle comprising a nucleotide sequence encoding a second micro-dystrophin to skeletal muscle (e.g., optimized for skeletal muscle). In some embodiments, the first recombinant adeno-associated virus (rAAV) particle comprising a nucleotide sequence encoding a first micro-dystrophin protein adapted for cardiac muscle also comprises a nucleotide sequence encoding a first utrophin protein region. In some embodiments, the second rAAV particle comprising a nucleotide sequence encoding a second micro-dystrophin adapted for skeletal muscle also comprises a nucleotide sequence encoding a second utrophin protein region. In some embodiments, the first recombinant adeno-associated virus (rAAV) particle comprises a nucleotide sequence encoding a first chimeric protein comprising a first micro-dystrophin protein and a first utrophin protein region to cardiac muscle. In some embodiments, the second recombinant adeno-associated virus (rAAV) particle comprises a nucleotide sequence encoding a second chimeric protein comprising a second micro-dystrophin protein and a second utrophin protein region to skeletal muscle. In some embodiments, the first or second micro-dystrophin protein comprises one or more utrophin protein domains. In some embodiments, an rAAV particle comprising a nucleotide sequence encoding a micro-dystrophin protein adapted for one type (e.g., cardiac or skeletal) of muscle tissue may be delivered to another type (e.g., cardiac or skeletal) of muscle tissue. In some embodiments, the first rAAV particle is adapted for delivery to cardiac muscle tissue. In some embodiments, the second rAAV particle is adapted for delivery to skeletal muscle tissue.

[0029] In some embodiments, methods are provided for transducing a cardiac muscle cell with the first rAAV particle of the disclosure. In some embodiments, methods are provided for transducing a skeletal muscle cell with the second rAAV particle of the disclosure.

[0030] In some embodiments, methods are provided for delivery of the first rAAV particle to cardiac muscle tissue. In some embodiments, methods are provided for delivery of the second rAAV particle to skeletal muscle tissue.

[0031] In some embodiments, the first rAAV particle comprises a cardiac-specific promoter operably linked to the nucleotide sequence encoding the first micro-dystrophin protein. In some embodiments, the second rAAV particle comprises a skeletal muscle-specific promoter operably linked to the nucleotide sequence encoding the second micro-dystrophin protein. In some embodiments, the first rAAV particle comprises a cardiac-specific promoter operably linked to the nucleotide sequence encoding the first chimeric protein. In some embodiments, the second rAAV particle comprises a skeletal muscle-specific promoter operably linked to the nucleotide sequence encoding the second chimeric protein. The first chimeric protein may comprise any of the proteins comprising a micro-dystrophin protein region and a utrophin protein region disclosed herein. The second chimeric protein may comprise any of the proteins comprising a micro-dystrophin protein region and a utrophin protein region disclosed herein. In some embodiments, the first chimeric protein and the second chimeric protein is the same. In some embodiments, the first chimeric protein and the second chimeric protein are different.

[0032] As such, provided herein are methods of treatment comprising delivering to the subject a first rAAV particle comprising a vector encoding any of the disclosed chimeric proteins to cardiac muscle and a second rAAV particle comprising a vector encoding any of the disclosed chimeric proteins to skeletal muscle. In some embodiments, these methods are intended for treatment of a subject suffering from a skeletal muscle disorder. In some embodiments, these methods are intended for treatment of a subject suffering from DMD.

[0033] In some embodiments, the first and second rAAV particles are of the same serotype. In some embodiments, the first and second rAAV particles are of different serotypes. In some embodiments, the first rAAV particle comprises a capsid protein derived from AAV9, AAVrh.74, or AAVrh.10. In some embodiments, the second rAAV particle comprises a capsid protein derived from AAV8.

[0034] In some embodiments, the first and second rAAV particles are delivered by the same route of administration. In some embodiments, the first and second rAAV particles are delivered by a single catheter. In some embodiments, the first and second rAAV particles are delivered by different routes of administration. In some embodiments, the first and second rAAV particles are delivered by different catheters. In some embodiments, the first and second rAAV particles are delivered by two or more (e.g., two, three, four, five, or more than five) catheters. Delivery of the first rAAV particle and the second rAAV particle may be relatively simultaneous, or at different times. In some embodiments, delivery of the first rAAV particle and the second rAAV particle are through different routes of administration and at different times. In some embodiments, delivery of the first rAAV particle occurs within 1-24 hours, 24-48 hours, 48-72 hours, 72 hours to a week, 1 week to 2 weeks, 1 week to 3 weeks, 2 weeks to 4 weeks, more than 4 weeks after, or more than 5 weeks after, of delivery of the second rAAV particle

[0035] In some embodiments, the first and second rAAV particles are delivered via one or more catheters. In some embodiments, the method comprises: (i) introducing a catheter into the femoral artery and advancing to the heart; (ii) delivering the first rAAV particle into the left and right coronary arteries; (iii) retracting the catheter to the aortic arch; and (iv) delivering the second rAAV particle to the subclavian and/or carotid arteries. In some embodiments, the method further comprises (v) retracting the catheter into the descending aorta and delivering the second rAAV particle to skeletal muscle via descending aortic branches.

[0036] In some aspects, the present disclosure provides a method of delivering an rAAV particle to a skeletal muscle in a subject, the method comprising delivering the rAAV particle via a catheter. In some embodiments, the method comprises delivering the rAAV particle to the subclavian and/or carotid arteries. In some embodiments, the catheter is first introduced into the femoral artery and advanced to the subclavian and/or carotid arteries. In some embodiments, the method further comprises retracting the catheter into the descending aorta and delivering the rAAV particle to skeletal muscle via descending aortic branches.

[0037] In some embodiments, the method further comprises administering a vasodilator to the subject prior to the delivery of the first and second rAAV particles. In some embodiments, a blood pressure cuff is inflated on each limb at the time of delivery of the first rAAV particle and/or the second rAAV particle. In some embodiments, the skeletal muscle is fast-twitch or slow-twitch.

[0038] In some embodiments, the vasodilator is a PDE5 inhibitor. In some embodiments, the PDE5 inhibitor is sildenafil or tadalafil. In some embodiments, the vasodilator is administered 10 minutes, 20 minutes, 30 minutes, 40 minutes, 50 minutes, or 1 hour prior to the delivery of first rAAV and/or second rAAV.

[0039] In some embodiments, the first micro-dystrophin protein comprises: an amino-terminal actin-binding domain, hinge domain 1, spectrin-like repeat 1, spectrin-like repeat 17, spectrin-like repeat 18, and spectrin-like repeat 19, and wherein the micro-dystrophin protein does not contain spectrin-like repeat 2 and/or spectrin-like repeat 3 of dystrophin. In some embodiments, the first micro-dystrophin protein further comprises one or more of: spectrin-like repeat 24, hinge domain 4, and dystroglycan binding site of dystrophin. In some embodiments, the first micro-dystrophin protein further comprises one or more syntrophin binding domains of dystrophin. In some embodiments, the first micro-dystrophin protein further comprises one or more coiled coil domains of dystrophin. In some embodiments, the spectrin-like repeat 1 of the first micro-dystrophin protein is directly coupled to the spectrin-like repeat 17. In some embodiments, the spectrin-like repeat 19 of the first micro-dystrophin protein is directly coupled to spectrin-like repeat 24. In some embodiments, the spectrin-like repeat 19 of the first micro-dystrophin protein is directly coupled to hinge domain 4.

[0040] In some embodiments, the second micro-dystrophin protein comprises: an amino-terminal actin-binding domain, hinge domain 1, spectrin-like repeat 1, spectrin-like repeat 2, spectrin-like repeat 16, and spectrin-like repeat 17, and wherein the micro-dystrophin protein does not contain spectrin-like repeat 3 of dystrophin. In some embodiments, the second micro-dystrophin protein further comprises one or more of: spectrin-like repeat 23, spectrin-like repeat 24, hinge domain 4, and dystroglycan binding site of dystrophin. In some embodiments, the second micro-dystrophin protein further comprises one or more syntrophin binding domains of dystrophin. In some embodiments, the second micro-dystrophin protein further comprises one or more coiled coil domains of dystrophin. In some embodiments, the spectrin-like repeat 2 of the second micro-dystrophin protein is directly coupled to spectrin-like repeat 16. In some embodiments, the spectrin-like repeat 17 of the second micro-dystrophin protein is directly coupled to spectrin-like repeat 24. In some embodiments, the spectrin-like repeat 17 of the second micro-dystrophin protein is directly coupled to hinge domain 4.

[0041] In some embodiments, the first or second micro-dystrophin protein comprises the region of dystrophin from spectrin-like repeat 24 to the C-terminus. In some embodiments, the first or second micro-dystrophin protein comprises the region of dystrophin from spectrin-like repeat 24 to the end of the proline rich region following the first coiled coil domain. In some embodiments, the first or second micro-dystrophin protein comprises the region of dystrophin from hinge domain 4 to the C-terminus. In some embodiments, the first or second micro-dystrophin protein comprises the region of dystrophin from hinge domain 4 to the end of the proline rich region following the first coiled coil domain. In some embodiments, the first or second micro-dystrophin protein comprises the region of dystrophin from hinge domain 4 to the end of the second syntrophin binding domain. In some embodiments, the first or second micro-dystrophin protein comprises the region of utrophin from the N-terminus to spectrin-like repeat 1. In some embodiments, the first or second micro-dystrophin protein comprises the region of utrophin from the N-terminus to spectrin-like repeat 2. In some embodiments, the first or second micro-dystrophin protein comprises the region of utrophin from the N-terminus to spectrin-like repeat 3. In some embodiments, the first or second micro-dystrophin protein comprises the region of utrophin from the N-terminus to hinge 2.

### BRIEF DESCRIPTION OF DRAWINGS

[0042] FIG. 1 shows a diagram of dystrophin and its interactions, showing known syntrophin binding sites (or domains).

[0043] FIG. 2 shows a diagram of full-length dystrophin showing order of Repeats (R) and hinges (H), as well as the cysteine-rich portion of the C-terminus (CR), which is commonly included in micro-dystrophins and referred to as the truncated C-terminus, which is then followed by the rest of the C-terminus (CT).

[0044] FIG. 3 shows the structure of dystrophin and micro-dystrophin constructs. A schematic diagram of full-length dystrophin and the micro-dystrophin versions that are being evaluated in current clinical trials. Also diagrammed is the variant of the ΔR3-R19/ΔR20-R21 ΔCT micro-dystrophin construct (ΔR3-R21 ΔCT), which was compared to exemplary micro-utrophin/dystrophin chimeric proteins of the disclosure. In ΔR3-R21 ΔCT, the N terminus of utrophin (ending at utrophin repeat 2) is connected to dystrophin repeat 23 through the C-terminal syntrophin binding sites of dystrophin.

[0045] FIG. 4 shows the results of protection from contraction-induced injury resulting from an exemplary micro-utrophin/dystrophin chimeric protein of the disclosure. These experiments compared the loss of creatine kinase from muscle fibers due to membrane leakage and loss of force generation due to muscle damage following administration of the chimeric protein and several micro-dystrophin constructs Published protocols were used to compare the degree of protection conferred by the chimeric protein to that conferred by the micro-dystrophins shown in FIG. 3, similar to those used in clinical trials. SPₒ, specific force.

[0046] FIG. 5 shows how the chimera contains the N terminus of utrophin, ending at utrophin repeat 2, to dystrophin repeat 23, through the C-terminal syntrophin binding sites of dystrophin.

[0047] FIG. 6 shows the loss of force generation due to eccentric muscle damage. Note that it is possible for AAV-delivery of the utrophin/dystrophin chimera to provide as much protection as delivery of the micro-dystrophin construct, and protects more than delivering neither construct.

[0048] FIG. 7 shows the maintained force generation in dystrophic muscle. Both the maximal absolute force generation and the specific force (SPₒ) production, measured by force per cross-sectional area, are reduced by the loss of dystrophin. AAV-delivery of either the micro-dystrophin or the micro-utrophin/dystrophin chimera may improve the force towards normal. Con=control.

### DETAILED DESCRIPTION

[0049] The following detailed description is made by way of illustration of certain aspects of the disclosure. It is to be understood that other aspects are contemplated and may be made without departing from the scope or spirit of the present disclosure. The following detailed description, therefore, is not to be taken in a limiting sense. Scientific and technical terms used herein have meanings commonly used in the art unless otherwise specified. The definitions provided herein are to facilitate understanding of certain terms used frequently herein and are not meant to limit the scope of the present disclosure.

### Overview

[0050] The present disclosure relates to compositions and methods of cardiac muscle and/or skeletal muscle gene therapy, e.g., for treating DMD.

[0051] Gene therapy for DMD has moved into the clinic, with four ongoing clinical trials and more planned. The ongoing trials deliver a truncated version of the deficient protein, dystrophin, to heart and skeletal muscle using AAV. The reason for delivery of a truncated protein, known as micro-dystrophin is that the full length protein will not fit within the packaging limits of AAV.

[0052] However, a number of significant problems remain. There is a need to prevent and resolve fibrosis in order to improve the efficiency of delivery and enable the use of lower viral doses. Additional therapeutics may be needed to slow the skeletal muscle disease progression that remains after micro-dystrophin therapy. Perhaps the most critical issue facing AAV gene therapy for DMD is that current micro-dystrophin designs and vector doses are optimized for skeletal muscle without sufficient evaluation of the potential impact on cardiac muscle function.

[0053] The micro-dystrophins in trials have resulted from more than a decade of investigation of constructs in the dystrophin-deficient mdx mouse. The inventors have recently analyzed these constructs in clinical trials in a newer, more severe mouse model (D2.mdx mouse) that is much more indicative of the human disease. Without wishing to be bound by theory, based on the results of these mouse studies, it is predicted that the long-term consequences of existing gene therapies will be a form of DMD with severe cardiomyopathy and slowly failing skeletal muscle function. Accordingly, the inventors have identified the need for a different approach to micro-dystrophin delivery to skeletal muscle versus to the heart.

[0054] Designing different micro-dystrophin constructs that are optimal for each tissue will significantly improve the therapeutic effects of gene therapy with micro-dystrophin. In some embodiments, this involves simultaneous delivery of two separate vectors, one delivered systemically to skeletal muscles and one delivered directly into the coronary arteries of the heart, using different micro-dystrophin constructs and doses. In some embodiments, a small, skeletal muscle (fast and slow)-specific promoter is used for skeletal muscle. In some embodiments, a cardiac-specific promoter is used for the heart. The disclosure provides micro-dystrophin constructs with improved cardiac-corrective properties, likely to be safer and more beneficial than those in current trials. By combining additional gene therapy approaches with micro-dystrophin, long-lasting benefits to both striated muscle types can be achieved.

[0055] Accordingly, in one aspect, the present disclosure provides compositions and methods for producing micro-dystrophin proteins, and the use thereof. The present disclosure provides nucleic acids encoding micro-dystrophin proteins optimized for either skeletal muscle or cardiac muscle. As used herein in the context of a target tissue, the phrase “optimized for” refers to a construct that contains elements that are more beneficial for the target tissue (either cardiac or skeletal muscle). A construct that is “optimized for” a target tissue may however be expressed in, and beneficial for, tissues other than the target tissue (e.g., both skeletal and cardiac muscle). In some embodiments, the nucleic acids encoding micro-dystrophin proteins are optimized for cardiac muscle. In some embodiments, the nucleic acids encoding micro-dystrophin proteins are optimized for skeletal muscle. In some embodiments, the present disclosure provides compositions and methods for producing chimeric proteins comprising a micro-dystrophin protein as described herein and a utrophin protein region, and the use thereof.

[0056] In another aspect, the present disclosure relates to skeletal muscle-specific promoters and the use thereof.

[0057] In yet another aspect, the present disclosure relates to localized delivery (e.g., catheter-based delivery) of gene therapy vectors (e.g., rAAV vectors) to skeletal muscle and/or cardiac muscle. The inventors have found that catheter-based delivery of gene therapy vectors to skeletal muscle and/or cardiac muscle is more efficient and allows for a better distribution of the gene therapy vectors, enabling the use of lower doses of the gene therapy vectors. This in turn mitigates any unfavorable immune responses to the gene therapy vectors. In some embodiments, the present disclosure provides a catheter-based method of delivering a gene therapy vector (e.g., an rAAV vector) to skeletal muscle. In some embodiments, the present disclosure provides a catheter-based method of simultaneously delivering one or more gene therapy vectors (e.g., one or more rAAV vectors) to skeletal muscle and cardiac muscle. In some embodiments, the gene therapy vector targeted to skeletal muscle comprises a nucleic acid encoding a micro-dystrophin protein that is optimized for skeletal muscle and the gene therapy vector targeted to cardiac muscle comprises a nucleic acid encoding a micro-dystrophin protein that is optimized for cardiac muscle.

### Chimeric Proteins and Constructs

[0058] The micro-dystrophin constructs disclosed herein may encode a chimeric protein with one or more heterologous domains (e.g., one or more utrophin domains). In some aspects, the present disclosure provides a chimeric construct comprising a nucleotide sequence encoding a micro-dystrophin protein comprising one or more utrophin protein domain. In some aspects, the present disclosure provides a chimeric protein comprising a dystrophin region (or domain) and a utrophin region (or domain). In some embodiments, the present disclosure provides a recombinant nucleic acid comprising a nucleotide sequence encoding a chimeric protein comprising a dystrophin region and a utrophin region. In some embodiments, the chimeric protein comprises a carboxy-terminal (also referred to herein as “C-terminal” or “C-terminus”) region of dystrophin coupled to an amino-terminal (also referred to herein as “N-terminal” or “N-terminus”) region of utrophin. In some embodiments, the chimeric protein comprises one or more N-terminal regions of utrophin. In some embodiments, the chimeric protein consists of N-terminal regions of utrophin coupled to the C-terminal regions of dystrophin.

[0059] A micro-dystrophin gene as used herein refers to a truncated dystrophin gene that is generally less than 5 kb in length. A micro-dystrophin gene is generally small enough to fit into an AAV vector. In some embodiments, a micro-dystrophin gene is less than about 4900 bp in length. In some embodiments, a micro-dystrophin gene is less than about 4800 bp in length. In some embodiments, a micro-dystrophin gene is less than about 4700, 4600, or 4500 bp in length. In some embodiments, a micro-dystrophin gene is between about 3600-5000 bp in length. In some embodiments, a micro-dystrophin gene is between about 3600-4800 bp in length, about 3600-4500 bp in length, about 3300-5000 bp in length, about 3300 to 4800 bp in length, about 3300 to 4500 bp in length, about 3000-5000 bp in length, about 3000-4800 bp in length, or about 3000-4500 bp in length. A micro-dystrophin protein as used herein is less than about 1700 aa in length. In some embodiments, a micro-dystrophin protein is less than about 1666 aa in length. In some embodiments, a micro-dystrophin protein is less than about 1600 aa in length. In some embodiments, a micro-dystrophin protein is between about 1200-1700 aa in length. In some embodiments, a micro-dystrophin protein is between about 1200-1666 aa in length, about 1200-1600 aa in length, about 1100-1700 aa in length, about 1100-1666 aa in length, about 1100 to 1600 aa in length, about 1100-1700 aa in length, about 1000-1666 aa in length, or about 1000-1600 aa in length. A micro-dystrophin gene may include naturally occurring dystrophin sequences from any species and variants derived from such genes by mutagenesis, or other modifications.

[0060] In some embodiments, a micro-dystrophin protein as described herein further comprises one or more utrophin protein domains. In some embodiments, a micro-dystrophin protein optimized for cardiac muscle comprises a utrophin N-terminus. In some embodiments, a micro-dystrophin protein comprises the region of utrophin from the N-terminus to spectrin-like repeat 1.

[0061] Non-limiting examples of human chimeric utrophin/dystrophin micro-dystrophin proteins optimized for cardiac muscle are described below.

Utrophin N-terminus through R1_Dystrophin R17-R19_R24+H4+trCterm:
(SEQ ID NO: 81)
MAKYGEHEASPDNGQNEFSDIIKSRSDEHNDVQKKTFTKWINARFSKSGKPPINDMFTDLKDGRKLLDLLEGLTG
TSLPKERGSTRVHALNNVNRVLQVLHQNNVELVNIGGTDIVDGNHKLTLGLLWSIILHWQVKDVMKDVMSDLQQT
NSEKILLSWVRQTTRPYSQVNVLNFTTSWTDGLAFNAVLHRHKPDLFSWDKVVKMSPIERLEHAFSKAQTYLGIE
KLLDPEDVAVQLPDKKSIIMYLTSLFEVLPQQVTIDAIREVETLPRKYKKECEEEAINIQSTAPEEEHESPRAET
PSTVTEVDMDLDSYQIALEEVLTWLLSAEDTFQEQDDISDDVEEVKDQFATHEAFMMELTAHQSSVGSVLQAGNQ
LITQGTLSDEEEFEIQEQMTLLNARWEALRVESMDRQSRLHDVLMAASARSVEKWRRFHYDIKIFNQWLTEAEQF
LRKTQIPENWEHAKYKWYLKELQDGIGQRQTVVRTLNATGEEIIQQSSKTDASILQEKLGSLNLRWQEVCKQLSD
RKKRLEEQKNILSEFQRDLNEFVLWLEEADNIASIPLEPGKEQQLKEKLEQVKLLVEELPLRQGILKQLNETGGP
VLVSAPISPEEQDKLENKLKQTNLQWIKVSRALPEKQGEIEAQIKDLGQLEKKLEDLEEQLNHLLLWLSPIRNQL
EIYNQPNQEGPFDVKETEIAVQAKQPDVEEILSKGQHLYKEKPATQPVKRKLEDLSSEWKAVNRLLQELRAKQWQ
RKIDETLERLQELQEATDELDLKLRQAEVIKGSWQPVGDLLIDSLQDHLEKVKALRGEIAPLKENVSHVNDLARQ
LTTLGIQLSPYNLSTLEDLNTRWKLLQVAVEDRVRQLHEAHRDFGPASQHELSTSVQGPWERAISPNKVPYYINH
ETQTTCWDHPKMTELYQSLADLNNVRFSAYRTAMKLRRLQKALCLDLLSLSAACDALDQHNLKQNDQPMDILQII
NCLTTIYDRLEQEHNNLVNVPLCVDMCLNWLLNVYDTGRIGRIRVLSFKTGIISLCKAHLEDKYRYLFKQVASST
GFCDQRRLGLLLHDSIQIPRQLGEVASFGGSNIEPSVRSCFQFANNKPEIEAALFLDWMRLEPQSMVWLPVLHRV
AAAETAKHQAKCNICKECPIIGFRYRSLKHFNYDICQSCFFSGRVAKGHKMHYPMVEYCTPTTSGEDVRDFAKVL
KNKFRTKRYFAKHPRMGYLPVQTVLEGDNMETP
Utrophin N-terminus through R1_Dystrophin R17-R19_H4 to 1st coiled
coil and proline rich region that follows:
(SEQ ID NO: 82)
MAKYGEHEASPDNGQNEFSDIIKSRSDEHNDVQKKTFTKWINARFSKSGKPPINDMFTDLKDGRKLLDLLEGLTG
TSLPKERGSTRVHALNNVNRVLQVLHQNNVELVNIGGTDIVDGNHKLTLGLLWSIILHWQVKDVMKDVMSDLQQT
NSEKILLSWVRQTTRPYSQVNVLNFTTSWTDGLAFNAVLHRHKPDLFSWDKVVKMSPIERLEHAFSKAQTYLGIE
KLLDPEDVAVQLPDKKSIIMYLTSLFEVLPQQVTIDAIREVETLPRKYKKECEEEAINIQSTAPEEEHESPRAET
PSTVTEVDMDLDSYQIALEEVLTWLLSAEDTFQEQDDISDDVEEVKDQFATHEAFMMELTAHQSSVGSVLQAGNQ
LITQGTLSDEEEFEIQEQMTLLNARWEALRVESMDRQSRLHDVLMAASARSVEKWRRFHYDIKIFNQWLTEAEQF
LRKTQIPENWEHAKYKWYLKELQDGIGQRQTVVRTLNATGEEIIQQSSKTDASILQEKLGSLNLRWQEVCKQLSD
RKKRLEEQKNILSEFQRDLNEFVLWLEEADNIASIPLEPGKEQQLKEKLEQVKLLVEELPLRQGILKQLNETGGP
VLVSAPISPEEQDKLENKLKQTNLQWIKVSRALPEKQGEIEAQIKDLGQLEKKLEDLEEQLNHLLLWLSPIRNQL
EIYNQPNQEGPFDVKETEIAVQAKQPDVEEILSKGQHLYKEKPATQPVKRKLEDLSSEWKAVNRLLQELRAKQGP
ASQHELSTSVQGPWERAISPNKVPYYINHETQTTCWDHPKMTELYQSLADLNNVRESAYRTAMKLRRLQKALCLD
LLSLSAACDALDQHNLKQNDQPMDILQIINCLTTIYDRLEQEHNNLVNVPLCVDMCLNWLLNVYDTGRTGRIRVL
SFKTGIISLCKAHLEDKYRYLFKQVASSTGFCDQRRLGLLLHDSIQIPRQLGEVASEGGSNIEPSVRSCFQFANN
KPEIEAALFLDWMRLEPQSMVWLPVLHRVAAAETAKHQAKCNICKECPIIGFRYRSLKHENYDICQSCFFSGRVA
KGHKMHYPMVEYCTPTTSGEDVRDFAKVLKNKFRTKRYFAKHPRMGYLPVQTVLEGDNMETPVTLINFWPVDSAP
ASSPQLSHDDTHSRIEHYASRLAEMENSNGSYLNDSISPNESIDDEHLLIQHYCQSLNQDSPLSQPRSPAQILIS
LESEERGELERILADLEEENRNLQAEYDRLKQQHEHKGLSPLPSPPEMMPTSPQSP
Utrophin N-terminus through R1_Dystrophin R17-R19_R24 to end of
syntrophin region:
(SEQ ID NO: 83)
MAKYGEHEASPDNGQNEFSDIIKSRSDEHNDVQKKTFTKWINARFSKSGKPPINDMFTDLKDGRKLLDLLEGLTG
TSLPKERGSTRVHALNNVNRVLQVLHQNNVELVNIGGTDIVDGNHKLTLGLLWSIILHWQVKDVMKDVMSDLQQT
NSEKILLSWVRQTTRPYSQVNVLNFTTSWTDGLAFNAVLHRHKPDLFSWDKVVKMSPIERLEHAFSKAQTYLGIE
KLLDPEDVAVQLPDKKSIIMYLTSLFEVLPQQVTIDAIREVETLPRKYKKECEEEAINIQSTAPEEEHESPRAET
PSTVTEVDMDLDSYQIALEEVLTWLLSAEDTFQEQDDISDDVEEVKDQFATHEAFMMELTAHQSSVGSVLQAGNQ
LITQGTLSDEEEFEIQEQMTLLNARWEALRVESMDRQSRLHDVLMAASARSVEKWRRFHYDIKIFNQWLTEAEQF
LRKTQIPENWEHAKYKWYLKELQDGIGQRQTVVRTLNATGEEIIQQSSKTDASILQEKLGSLNLRWQEVCKQLSD
RKKRLEEQKNILSEFQRDLNEFVLWLEEADNIASIPLEPGKEQQLKEKLEQVKLLVEELPLRQGILKQLNETGGP
VLVSAPISPEEQDKLENKLKQTNLQWIKVSRALPEKQGEIEAQIKDLGQLEKKLEDLEEQLNHLLLWLSPIRNQL
EIYNQPNQEGPFDVKETEIAVQAKQPDVEEILSKGQHLYKEKPATQPVKRKLEDLSSEWKAVNRLLQELRAKQWQ
RKIDETLERLQELQEATDELDLKLRQAEVIKGSWQPVGDLLIDSLQDHLEKVKALRGEIAPLKENVSHVNDLARQ
LTTLGIQLSPYNLSTLEDLNTRWKLLQVAVEDRVRQLHEAHRDFGPASQHELSTSVQGPWERAISPNKVPYYINH
ETQTTCWDHPKMTELYQSLADLNNVRESAYRTAMKLRRLQKALCLDLLSLSAACDALDQHNLKQNDQPMDILQII
NCLTTIYDRLEQEHNNLVNVPLCVDMCLNWLLNVYDTGRIGRIRVLSFKTGIISLCKAHLEDKYRYLFKQVASST
GFCDQRRLGLLLHDSIQIPRQLGEVASFGGSNIEPSVRSCFQFANNKPEIEAALFLDWMRLEPQSMVWLPVLHRV
AAAETAKHQAKCNICKECPIIGFRYRSLKHFNYDICQSCFFSGRVAKGHKMHYPMVEYCTPTTSGEDVRDFAKVL
KNKFRTKRYFAKHPRMGYLPVQTVLEGDNMETPVTLINFWPVDSAPASSPQLSHDDTHSRIEHYASRLAEMENSN
GSYLNDSISPNESIDDEHLLIQHYCQSLNQDSPLSQPRS
Utrophin N-terminus through R1_Dystrophin R23 to end of dystrophin:
(SEQ ID NO: 84)
MAKYGEHEASPDNGQNEFSDIIKSRSDEHNDVQKKTFTKWINARFSKSGKPPINDMFTDLKDGRKLLDLLEGLTG
TSLPKERGSTRVHALNNVNRVLQVLHQNNVELVNIGGTDIVDGNHKLTLGLLWSIILHWQVKDVMKDVMSDLQQT
NSEKILLSWVRQTTRPYSQVNVLNFTTSWTDGLAFNAVLHRHKPDLFSWDKVVKMSPIERLEHAFSKAQTYLGIE
KLLDPEDVAVQLPDKKSIIMYLTSLFEVLPQQVTIDAIREVETLPRKYKKECEEEAINIQSTAPEEEHESPRAET
PSTVTEVDMDLDSYQIALEEVLTWLLSAEDTFQEQDDISDDVEEVKDQFATHEAFMMELTAHQSSVGSVLQAGNQ
LITQGTLSDEEEFEIQEQMTLLNARWEALRVESMDRQSRLHDVLMAASASSDQWKRLHLSLQELLVWLQLKDDEL
SRQAPIGGDFPAVQKQNDVHRAFKRELKTKEPVIMSTLETVRIFLTEQPLEGLEKLYQEPRELPPEERAQNVTRL
LRKQAEEVNTEWEKLNLHSADWQRKIDETLERLQELQEATDELDLKLRQAEVIKGSWQPVGDLLIDSLQDHLEKV
KALRGEIAPLKENVSHVNDLARQLTTLGIQLSPYNLSTLEDLNTRWKLLQVAVEDRVRQLHEAHRDFGPASQHEL
STSVQGPWERAISPNKVPYYINHETQTTCWDHPKMTELYQSLADLNNVRESAYRTAMKLRRLQKALCLDLLSLSA
ACDALDQHNLKQNDQPMDILQIINCLTTIYDRLEQEHNNLVNVPLCVDMCLNWLLNVYDTGRIGRIRVLSFKTGI
ISLCKAHLEDKYRYLFKQVASSTGFCDQRRLGLLLHDSIQIPRQLGEVASFGGSNIEPSVRSCFQFANNKPEIEA
ALFLDWMRLEPQSMVWLPVLHRVAAAETAKHQAKCNICKECPIIGFRYRSLKHFNYDICQSCFFSGRVAKGHKMH
YPMVEYCTPTTSGEDVRDFAKVLKNKFRTKRYFAKHPRMGYLPVQTVLEGDNMETPVTLINFWPVDSAPASSPQL
SHDDTHSRIEHYASRLAEMENSNGSYLNDSISPNESIDDEHLLIQHYCQSLNQDSPLSQPRSPAQILISLESEER
GELERILADLEEENRNLQAEYDRLKQQHEHKGLSPLPSPPEMMPTSPQSPRDAELIAEAKLLRQHKGRLEARMQI
LEDHNKQLESQLHRLRQLLEQPQAEAKVNGTTVSSPSTSLQRSDSSQPMLLRVVGSQTSDSMGEEDLLSPPQDTS
TGLEEVMEQLNNSFPSSRGRNTPGKPMREDTM

### Nucleic Acid Sequences Encoding Chimeric Proteins

[0062] Non-limiting examples of nucleotide sequences encoding human chimeric utrophin-dystrophin micro-dystrophin proteins optimized for cardiac muscle are described below.

Utrophin N-terminus through R1_Dystrophin R17-R19_R24+H4+trCterm:
Human Sequences without codon alterations:
(SEQ ID NO: 85)
ATGGCCAAGTATGGAGAACATGAAGCCAGTCCTGACAATGGGCAGAACGAATTCAGTGATATCATTAAGTCCAGA
TCTGATGAACACAATGACGTACAGAAGAAAACCTTTACCAAATGGATAAATGCTCGATTTTCAAAGAGTGGGAAA
CCACCCATCAATGATATGTTCACAGACCTCAAAGATGGAAGGAAGCTATTGGATCTTCTAGAAGGCCTCACAGGA
ACATCACTGCCAAAGGAACGTGGTTCCACAAGGGTACATGCCTTAAATAACGTCAACAGAGTGCTGCAGGTTTTA
CATCAGAACAATGTGGAATTAGTGAATATAGGGGGAACTGACATTGTGGATGGAAATCACAAACTGACTTTGGGG
TTACTTTGGAGCATCATTTTGCACTGGCAGGTGAAAGATGTCATGAAGGATGTCATGTCGGACCTGCAGCAGACG
AACAGTGAGAAGATCCTGCTCAGCTGGGTGCGTCAGACCACCAGGCCCTACAGCCAAGTCAACGTCCTCAACTTC
ACCACCAGCTGGACAGATGGACTCGCCTTTAATGCTGTCCTCCACCGACATAAACCTGATCTCTTCAGCTGGGAT
AAAGTTGTCAAAATGTCACCAATTGAGAGACTTGAACATGCCTTCAGCAAGGCTCAAACTTATTTGGGAATTGAA
AAGCTGTTAGATCCTGAAGATGTTGCCGTTCAGCTTCCTGACAAGAAATCCATAATTATGTATTTAACATCTTTG
TTTGAGGTGCTACCTCAGCAAGTCACCATAGACGCCATCCGTGAGGTAGAGACACTCCCAAGGAAATATAAAAAA
GAATGTGAAGAAGAGGCAATTAATATACAGAGTACAGCGCCTGAGGAGGAGCATGAGAGTCCCCGAGCTGAAACT
CCCAGCACTGTCACTGAGGTTGACATGGATCTGGACAGCTATCAGATTGCGTTGGAGGAAGTGCTGACCTGGTTG
CTTTCTGCTGAGGACACTTTCCAGGAGCAGGATGATATTTCTGATGATGTTGAAGAAGTCAAAGACCAGTTTGCA
ACCCATGAAGCTTTTATGATGGAACTGACTGCACACCAGAGCAGTGTGGGCAGCGTCCTGCAGGCAGGCAACCAA
CTGATAACACAAGGAACTCTGTCAGACGAAGAAGAATTTGAGATTCAGGAACAGATGACCCTGCTGAATGCTAGA
TGGGAGGCTCTTAGGGTGGAGAGTATGGACAGACAGTCCCGGCTGCACGATGTGCTGATGGCCGCTAGCGCCAGA
TCTGTTGAGAAATGGCGGCGTTTTCATTATGATATAAAGATATTTAATCAGTGGCTAACAGAAGCTGAACAGTTT
CTCAGAAAGACACAAATTCCTGAGAATTGGGAACATGCTAAATACAAATGGTATCTTAAGGAACTCCAGGATGGC
ATTGGGCAGCGGCAAACTGTTGTCAGAACATTGAATGCAACTGGGGAAGAAATAATTCAGCAATCCTCAAAAACA
GATGCCAGTATTCTACAGGAAAAATTGGGAAGCCTGAATCTGCGGTGGCAGGAGGTCTGCAAACAGCTGTCAGAC
AGAAAAAAGAGGCTAGAAGAACAAAAGAATATCTTGTCAGAATTTCAAAGAGATTTAAATGAATTTGTTTTATGG
TTGGAGGAAGCAGATAACATTGCTAGTATCCCACTTGAACCTGGAAAAGAGCAGCAACTAAAAGAAAAGCTTGAG
CAAGTCAAGTTACTGGTGGAAGAGTTGCCCCTGCGCCAGGGAATTCTCAAACAATTAAATGAAACTGGAGGACCC
GTGCTTGTAAGTGCTCCCATAAGCCCAGAAGAGCAAGATAAACTTGAAAATAAGCTCAAGCAGACAAATCTCCAG
TGGATAAAGGTTTCCAGAGCTTTACCTGAGAAACAAGGAGAAATTGAAGCTCAAATAAAAGACCTTGGGCAGCTT
GAAAAAAAGCTTGAAGACCTTGAAGAGCAGTTAAATCATCTGCTGCTGTGGTTATCTCCTATTAGGAATCAGTTG
GAAATTTATAACCAACCAAACCAAGAAGGACCATTTGACGTTAAGGAAACTGAAATAGCAGTTCAAGCTAAACAA
CCGGATGTGGAAGAGATTTTGTCTAAAGGGCAGCATTTGTACAAGGAAAAACCAGCCACTCAGCCAGTGAAGAGG
AAGTTAGAAGATCTGAGCTCTGAGTGGAAGGCGGTAAACCGTTTACTTCAAGAGCTGAGGGCAAAGCAGTGGCAG
AGAAAAATAGATGAGACCCTTGAAAGACTCCGGGAACTTCAAGAGGCCACGGATGAGCTGGACCTCAAGCTGCGC
CAAGCTGAGGTGATCAAGGGATCCTGGCAGCCCGTGGGCGATCTCCTCATTGACTCTCTCCAAGATCACCTCGAG
AAAGTCAAGGCACTTCGAGGAGAAATTGCGCCTCTGAAAGAGAACGTGAGCCACGTCAATGACCTTGCTCGCCAG
CTTACCACTTTGGGCATTCAGCTCTCACCGTATAACCTCAGCACTCTGGAAGACCTGAACACCAGATGGAAGCTT
CTGCAGGTGGCCGTCGAGGACCGAGTCAGGCAGCTGCATGAAGCCCACAGGGACTTTGGTCCAGCATCTCAGCAC
TTTCTTTCCACGTCTGTCCAGGGTCCCTGGGAGAGAGCCATCTCGCCAAACAAAGTGCCCTACTATATCAACCAC
GAGACTCAAACAACTTGCTGGGACCATCCCAAAATGACAGAGCTCTACCAGTCTTTAGCTGACCTGAATAATGTC
AGATTCTCAGCTTATAGGACTGCCATGAAACTCCGAAGACTGCAGAAGGCCCTTTGCTTGGATCTCTTGAGCCTG
TCAGCTGCATGTGATGCCTTGGACCAGCACAACCTCAAGCAAAATGACCAGCCCATGGATATCCTGCAGATTATT
AATTGTTTGACCACTATTTATGACCGCCTGGAGCAAGAGCACAACAATTTGGTCAACGTCCCTCTCTGCGTGGAT
ATGTGTCTGAACTGGCTGCTGAATGTTTATGATACGGGACGAACAGGGAGGATCCGTGTCCTGTCTTTTAAAACT
GGCATCATTTCCCTGTGTAAAGCACATTTGGAAGACAAGTACAGATACCTTTTCAAGCAAGTGGCAAGTTCAACA
GGATTTTGTGACCAGCGCAGGCTGGGCCTCCTTCTGCATGATTCTATCCAAATTCCAAGACAGTTGGGTGAAGTT
GCATCCTTTGGGGGCAGTAACATTGAGCCAAGTGTCCGGAGCTGCTTCCAATTTGCTAATAATAAGCCAGAGATC
GAAGCGGCCCTCTTCCTAGACTGGATGAGACTGGAACCCCAGTCCATGGTGTGGCTGCCCGTCCTGCACAGAGTG
GCTGCTGCAGAAACTGCCAAGCATCAGGCCAAATGTAACATCTGCAAAGAGTGTCCAATCATTGGATTCAGGTAC
AGGAGTCTAAAGCACTTTAATTATGACATCTGCCAAAGCTGCTTTTTTTCTGGTCGAGTTGCAAAAGGCCATAAA
ATGCACTATCCCATGGTGGAATATTGCACTCCGACTACATCAGGAGAAGATGTTCGAGACTTTGCCAAGGTACTA
AAAAACAAATTTCGAACCAAAAGGTATTTTGCGAAGCATCCCCGAATGGGCTACCTGCCAGTGCAGACTGTCTTA
GAGGGGGACAACATGGAAACTCCC
Human Sequences with codon optimization:
(SEQ ID NO: 86)
ATGGCCAAGTACGGCGAGCACGAGGCCAGCCCCGACAACGGCCAGAACGAGTTCAGCGACATCATCAAGAGCCGG
AGCGACGAGCACAACGACGTGCAGAAGAAGACCTTCACCAAGTGGATCAACGCCCGGTTCAGCAAGAGCGGCAAG
CCCCCCATCAACGACATGTTCACCGACCTGAAGGACGGCCGGAAGCTGCTGGACCTGCTGGAGGGCCTGACCGGC
ACCAGCCTGCCCAAGGAGCGGGGCAGCACCCGGGTGCACGCCCTGAACAACGTGAACCGGGTGCTGCAGGTGCTG
CACCAGAACAACGTGGAGCTGGTGAACATCGGCGGCACCGACATCGTGGACGGCAACCACAAGCTGACCCTGGGC
CTGCTGTGGAGCATCATCCTGCACTGGCAGGTGAAGGACGTGATGAAGGACGTGATGAGCGACCTGCAGCAGACC
AACAGCGAGAAGATCCTGCTGAGCTGGGTGCGGCAGACCACCCGGCCCTACAGCCAGGTGAACGTGCTGAACTTC
ACCACCAGCTGGACCGACGGCCTGGCCTTCAACGCCGTGCTGCACCGGCACAAGCCCGACCTGTTCAGCTGGGAC
AAGGTGGTGAAGATGAGCCCCATCGAGCGGCTGGAGCACGCCTTCAGCAAGGCCCAGACCTACCTGGGCATCGAG
AAGCTGCTGGACCCCGAGGACGTGGCCGTGCAGCTGCCCGACAAGAAGAGCATCATCATGTACCTGACCAGCCTG
TTCGAGGTGCTGCCCCAGCAGGTGACCATCGACGCCATCCGGGAGGTGGAGACCCTGCCCCGGAAGTACAAGAAG
GAGTGCGAGGAGGAGGCCATCAACATCCAGAGCACCGCCCCCGAGGAGGAGCACGAGAGCCCCCGGGCCGAGACC
CCCAGCACCGTGACCGAGGTGGACATGGACCTGGACAGCTACCAGATCGCCCTGGAGGAGGTGCTGACCTGGCTG
CTGAGCGCCGAGGACACCTTCCAGGAGCAGGACGACATCAGCGACGACGTGGAGGAGGTGAAGGACCAGTTCGCC
ACCCACGAGGCCTTCATGATGGAGCTGACCGCCCACCAGAGCAGCGTGGGCAGCGTGCTGCAGGCCGGCAACCAG
CTGATCACCCAGGGCACCCTGAGCGACGAGGAGGAGTTCGAGATCCAGGAGCAGATGACCCTGCTGAACGCCCGG
TGGGAGGCCCTGCGGGTGGAGAGCATGGACCGGCAGAGCCGGCTGCACGACGTGCTGATGGCCGCTAGCGCCCGG
AGCGTGGAGAAGTGGCGGCGGTTCCACTACGACATCAAGATCTTCAACCAGTGGCTGACCGAGGCCGAGCAGTTC
CTGCGGAAGACCCAGATCCCCGAGAACTGGGAGCACGCCAAGTACAAGTGGTACCTGAAGGAGCTGCAGGACGGC
ATCGGCCAGCGGCAGACCGTGGTGCGGACCCTGAACGCCACCGGCGAGGAGATCATCCAGCAGAGCAGCAAGACC
GACGCCAGCATCCTGCAGGAGAAGCTGGGCAGCCTGAACCTGCGGTGGCAGGAGGTGTGCAAGCAGCTGAGCGAC
CGGAAGAAGCGGCTGGAGGAGCAGAAGAACATCCTGAGCGAGTTCCAGCGGGACCTGAACGAGTTCGTGCTGTGG
CTGGAGGAGGCCGACAACATCGCCAGCATCCCCCTGGAGCCCGGCAAGGAGCAGCAGCTGAAGGAGAAGCTGGAG
CAGGTGAAGCTGCTGGTGGAGGAGCTGCCCCTGCGGCAGGGCATCCTGAAGCAGCTGAACGAGACCGGCGGCCCC
GTGCTGGTGAGCGCCCCCATCAGCCCCGAGGAGCAGGACAAGCTGGAGAACAAGCTGAAGCAGACCAACCTGCAG
TGGATCAAGGTGAGCCGGGCCCTGCCCGAGAAGCAGGGCGAGATCGAGGCCCAGATCAAGGACCTGGGCCAGCTG
GAGAAGAAGCTGGAGGACCTGGAGGAGCAGCTGAACCACCTGCTGCTGTGGCTGAGCCCCATCCGGAACCAGCTG
GAGATCTACAACCAGCCCAACCAGGAGGGCCCCTTCGACGTGAAGGAGACCGAGATCGCCGTGCAGGCCAAGCAG
CCCGACGTGGAGGAGATCCTGAGCAAGGGCCAGCACCTGTACAAGGAGAAGCCCGCCACCCAGCCCGTGAAGCGG
AAGCTGGAGGACCTGAGCAGCGAGTGGAAGGCCGTGAACCGGCTGCTGCAGGAGCTGCGGGCCAAGCAGTGGCAG
AGAAAAATAGATGAGACCCTTGAAAGACTCCGGGAACTTCAAGAGGCCACGGATGAGCTGGACCTCAAGCTGCGC
CAAGCTGAGGTGATCAAGGGATCCTGGCAGCCCGTGGGCGATCTCCTCATTGACTCTCTCCAAGATCACCTCGAG
AAAGTCAAGGCACTTCGAGGAGAAATTGCGCCTCTGAAAGAGAACGTGAGCCACGTCAATGACCTTGCTCGCCAG
CTTACCACTTTGGGCATTCAGCTCTCACCGTATAACCTCAGCACTCTGGAAGACCTGAACACCAGATGGAAGCTT
CTGCAGGTGGCCGTCGAGGACCGAGTCAGGCAGCTGCATGAAGCCCACAGGGACTTTGGTCCAGCATCTCAGCAC
TTTCTTTCCACGTCTGTCCAGGGTCCCTGGGAGAGAGCCATCTCGCCAAACAAAGTGCCCTACTATATCAACCAC
GAGACTCAAACAACTTGCTGGGACCATCCCAAAATGACAGAGCTCTACCAGTCTTTAGCTGACCTGAATAATGTC
AGATTCTCAGCTTATAGGACTGCCATGAAACTCCGAAGACTGCAGAAGGCCCTTTGCTTGGATCTCTTGAGCCTG
TCAGCTGCATGTGATGCCTTGGACCAGCACAACCTCAAGCAAAATGACCAGCCCATGGATATCCTGCAGATTATT
AATTGTTTGACCACTATTTATGACCGCCTGGAGCAAGAGCACAACAATTTGGTCAACGTCCCTCTCTGCGTGGAT
ATGTGTCTGAACTGGCTGCTGAATGTTTATGATACGGGACGAACAGGGAGGATCCGTGTCCTGTCTTTTAAAACT
GGCATCATTTCCCTGTGTAAAGCACATTTGGAAGACAAGTACAGATACCTTTTCAAGCAAGTGGCAAGTTCAACA
GGATTTTGTGACCAGCGCAGGCTGGGCCTCCTTCTGCATGATTCTATCCAAATTCCAAGACAGTTGGGTGAAGTT
GCATCCTTTGGGGGCAGTAACATTGAGCCAAGTGTCCGGAGCTGCTTCCAATTTGCTAATAATAAGCCAGAGATC
GAAGCGGCCCTCTTCCTAGACTGGATGAGACTGGAACCCCAGTCCATGGTGTGGCTGCCCGTCCTGCACAGAGTG
GCTGCTGCAGAAACTGCCAAGCATCAGGCCAAATGTAACATCTGCAAAGAGTGTCCAATCATTGGATTCAGGTAC
AGGAGTCTAAAGCACTTTAATTATGACATCTGCCAAAGCTGCTTTTTTTCTGGTCGAGTTGCAAAAGGCCATAAA
ATGCACTATCCCATGGTGGAATATTGCACTCCGACTACATCAGGAGAAGATGTTCGAGACTTTGCCAAGGTACTA
AAAAACAAATTTCGAACCAAAAGGTATTTTGCGAAGCATCCCCGAATGGGCTACCTGCCAGTGCAGACTGTCTTA
GAGGGGGACAACATGGAAACTCCC
Utrophin Nterm-R1_Dystrophin R17-R19_H4 to 1st coiled coil and
proline rich region that follows:
Human Sequences without codon alterations:
(SEQ ID NO: 87)
ATGGCCAAGTATGGAGAACATGAAGCCAGTCCTGACAATGGGCAGAACGAATTCAGTGATATCATTAAGTCCAGA
TCTGATGAACACAATGACGTACAGAAGAAAACCTTTACCAAATGGATAAATGCTCGATTTTCAAAGAGTGGGAAA
CCACCCATCAATGATATGTTCACAGACCTCAAAGATGGAAGGAAGCTATTGGATCTTCTAGAAGGCCTCACAGGA
ACATCACTGCCAAAGGAACGTGGTTCCACAAGGGTACATGCCTTAAATAACGTCAACAGAGTGCTGCAGGTTTTA
CATCAGAACAATGTGGAATTAGTGAATATAGGGGGAACTGACATTGTGGATGGAAATCACAAACTGACTTTGGGG
TTACTTTGGAGCATCATTTTGCACTGGCAGGTGAAAGATGTCATGAAGGATGTCATGTCGGACCTGCAGCAGACG
AACAGTGAGAAGATCCTGCTCAGCTGGGTGCGTCAGACCACCAGGCCCTACAGCCAAGTCAACGTCCTCAACTTC
ACCACCAGCTGGACAGATGGACTCGCCTTTAATGCTGTCCTCCACCGACATAAACCTGATCTCTTCAGCTGGGAT
AAAGTTGTCAAAATGTCACCAATTGAGAGACTTGAACATGCCTTCAGCAAGGCTCAAACTTATTTGGGAATTGAA
AAGCTGTTAGATCCTGAAGATGTTGCCGTTCAGCTTCCTGACAAGAAATCCATAATTATGTATTTAACATCTTTG
TTTGAGGTGCTACCTCAGCAAGTCACCATAGACGCCATCCGTGAGGTAGAGACACTCCCAAGGAAATATAAAAAA
GAATGTGAAGAAGAGGCAATTAATATACAGAGTACAGCGCCTGAGGAGGAGCATGAGAGTCCCCGAGCTGAAACT
CCCAGCACTGTCACTGAGGTTGACATGGATCTGGACAGCTATCAGATTGCGTTGGAGGAAGTGCTGACCTGGTTG
CTTTCTGCTGAGGACACTTTCCAGGAGCAGGATGATATTTCTGATGATGTTGAAGAAGTCAAAGACCAGTTTGCA
ACCCATGAAGCTTTTATGATGGAACTGACTGCACACCAGAGCAGTGTGGGCAGCGTCCTGCAGGCAGGCAACCAA
CTGATAACACAAGGAACTCTGTCAGACGAAGAAGAATTTGAGATTCAGGAACAGATGACCCTGCTGAATGCTAGA
TGGGAGGCTCTTAGGGTGGAGAGTATGGACAGACAGTCCCGGCTGCACGATGTGCTGATGGCCGCTAGCGCCAGA
TCTGTTGAGAAATGGCGGCGTTTTCATTATGATATAAAGATATTTAATCAGTGGCTAACAGAAGCTGAACAGTTT
CTCAGAAAGACACAAATTCCTGAGAATTGGGAACATGCTAAATACAAATGGTATCTTAAGGAACTCCAGGATGGC
ATTGGGCAGCGGCAAACTGTTGTCAGAACATTGAATGCAACTGGGGAAGAAATAATTCAGCAATCCTCAAAAACA
GATGCCAGTATTCTACAGGAAAAATTGGGAAGCCTGAATCTGCGGTGGCAGGAGGTCTGCAAACAGCTGTCAGAC
AGAAAAAAGAGGCTAGAAGAACAAAAGAATATCTTGTCAGAATTTCAAAGAGATTTAAATGAATTTGTTTTATGG
TTGGAGGAAGCAGATAACATTGCTAGTATCCCACTTGAACCTGGAAAAGAGCAGCAACTAAAAGAAAAGCTTGAG
CAAGTCAAGTTACTGGTGGAAGAGTTGCCCCTGCGCCAGGGAATTCTCAAACAATTAAATGAAACTGGAGGACCC
GTGCTTGTAAGTGCTCCCATAAGCCCAGAAGAGCAAGATAAACTTGAAAATAAGCTCAAGCAGACAAATCTCCAG
TGGATAAAGGTTTCCAGAGCTTTACCTGAGAAACAAGGAGAAATTGAAGCTCAAATAAAAGACCTTGGGCAGCTT
GAAAAAAAGCTTGAAGACCTTGAAGAGCAGTTAAATCATCTGCTGCTGTGGTTATCTCCTATTAGGAATCAGTTG
GAAATTTATAACCAACCAAACCAAGAAGGACCATTTGACGTTAAGGAAACTGAAATAGCAGTTCAAGCTAAACAA
CCGGATGTGGAAGAGATTTTGTCTAAAGGGCAGCATTTGTACAAGGAAAAACCAGCCACTCAGCCAGTGAAGAGG
AAGTTAGAAGATCTGAGCTCTGAGTGGAAGGCGGTAAACCGTTTACTTCAAGAGCTGAGGGCAAAGCAGGGTCCA
GCATCTCAGCACTTTCTTTCCACGTCTGTCCAGGGTCCCTGGGAGAGAGCCATCTCGCCAAACAAAGTGCCCTAC
TATATCAACCACGAGACTCAAACAACTTGCTGGGACCATCCCAAAATGACAGAGCTCTACCAGTCTTTAGCTGAC
CTGAATAATGTCAGATTCTCAGCTTATAGGACTGCCATGAAACTCCGAAGACTGCAGAAGGCCCTTTGCTTGGAT
CTCTTGAGCCTGTCAGCTGCATGTGATGCCTTGGACCAGCACAACCTCAAGCAAAATGACCAGCCCATGGATATC
CTGCAGATTATTAATTGTTTGACCACTATTTATGACCGCCTGGAGCAAGAGCACAACAATTTGGTCAACGTCCCT
CTCTGCGTGGATATGTGTCTGAACTGGCTGCTGAATGTTTATGATACGGGACGAACAGGGAGGATCCGTGTCCTG
TCTTTTAAAACTGGCATCATTTCCCTGTGTAAAGCACATTTGGAAGACAAGTACAGATACCTTTTCAAGCAAGTG
GCAAGTTCAACAGGATTTTGTGACCAGCGCAGGCTGGGCCTCCTTCTGCATGATTCTATCCAAATTCCAAGACAG
TTGGGTGAAGTTGCATCCTTTGGGGGCAGTAACATTGAGCCAAGTGTCCGGAGCTGCTTCCAATTTGCTAATAAT
AAGCCAGAGATCGAAGCGGCCCTCTTCCTAGACTGGATGAGACTGGAACCCCAGTCCATGGTGTGGCTGCCCGTC
CTGCACAGAGTGGCTGCTGCAGAAACTGCCAAGCATCAGGCCAAATGTAACATCTGCAAAGAGTGTCCAATCATT
GGATTCAGGTACAGGAGTCTAAAGCACTTTAATTATGACATCTGCCAAAGCTGCTTTTTTTCTGGTCGAGTTGCA
AAAGGCCATAAAATGCACTATCCCATGGTGGAATATTGCACTCCGACTACATCAGGAGAAGATGTTCGAGACTTT
GCCAAGGTACTAAAAAACAAATTTCGAACCAAAAGGTATTTTGCGAAGCATCCCCGAATGGGCTACCTGCCAGTG
CAGACTGTCTTAGAGGGGGACAACATGGAAACTCCCGTTACTCTGATCAACTTCTGGCCAGTAGATTCTGCGCCT
GCCTCGTCCCCTCAGCTTTCACACGATGATACTCATTCACGCATTGAACATTATGCTAGCAGGCTAGCAGAAATG
GAAAACAGCAATGGATCTTATCTAAATGATAGCATCTCTCCTAATGAGAGCATAGATGATGAACATTTGTTAATC
CAGCATTACTGCCAAAGTTTGAACCAGGACTCCCCCCTGAGCCAGCCTCGTAGTCCTGCCCAGATCTTGATTTCC
TTAGAGAGTGAGGAAAGAGGGGAGCTAGAGAGAATCCTAGCAGATCTTGAGGAAGAAAACAGGAATCTGCAAGCA
GAATATGACCGTCTAAAGCAGCAGCACGAACATAAAGGCCTGTCCCCACTGCCGTCCCCTCCTGAAATGATGCCC
ACCTCTCCCCAGAGTCCC
Human Sequences with codon optimization:
(SEQ ID NO: 88)
ATGGCCAAGTACGGCGAGCACGAGGCCAGCCCCGACAACGGCCAGAACGAGTTCAGCGACATCATCAAGAGCCGG
AGCGACGAGCACAACGACGTGCAGAAGAAGACCTTCACCAAGTGGATCAACGCCCGGTTCAGCAAGAGCGGCAAG
CCCCCCATCAACGACATGTTCACCGACCTGAAGGACGGCCGGAAGCTGCTGGACCTGCTGGAGGGCCTGACCGGC
ACCAGCCTGCCCAAGGAGCGGGGCAGCACCCGGGTGCACGCCCTGAACAACGTGAACCGGGTGCTGCAGGTGCTG
CACCAGAACAACGTGGAGCTGGTGAACATCGGCGGCACCGACATCGTGGACGGCAACCACAAGCTGACCCTGGGC
CTGCTGTGGAGCATCATCCTGCACTGGCAGGTGAAGGACGTGATGAAGGACGTGATGAGCGACCTGCAGCAGACC
AACAGCGAGAAGATCCTGCTGAGCTGGGTGCGGCAGACCACCCGGCCCTACAGCCAGGTGAACGTGCTGAACTTC
ACCACCAGCTGGACCGACGGCCTGGCCTTCAACGCCGTGCTGCACCGGCACAAGCCCGACCTGTTCAGCTGGGAC
AAGGTGGTGAAGATGAGCCCCATCGAGCGGCTGGAGCACGCCTTCAGCAAGGCCCAGACCTACCTGGGCATCGAG
AAGCTGCTGGACCCCGAGGACGTGGCCGTGCAGCTGCCCGACAAGAAGAGCATCATCATGTACCTGACCAGCCTG
TTCGAGGTGCTGCCCCAGCAGGTGACCATCGACGCCATCCGGGAGGTGGAGACCCTGCCCCGGAAGTACAAGAAG
GAGTGCGAGGAGGAGGCCATCAACATCCAGAGCACCGCCCCCGAGGAGGAGCACGAGAGCCCCCGGGCCGAGACC
CCCAGCACCGTGACCGAGGTGGACATGGACCTGGACAGCTACCAGATCGCCCTGGAGGAGGTGCTGACCTGGCTG
CTGAGCGCCGAGGACACCTTCCAGGAGCAGGACGACATCAGCGACGACGTGGAGGAGGTGAAGGACCAGTTCGCC
ACCCACGAGGCCTTCATGATGGAGCTGACCGCCCACCAGAGCAGCGTGGGCAGCGTGCTGCAGGCCGGCAACCAG
CTGATCACCCAGGGCACCCTGAGCGACGAGGAGGAGTTCGAGATCCAGGAGCAGATGACCCTGCTGAACGCCCGG
TGGGAGGCCCTGCGGGTGGAGAGCATGGACCGGCAGAGCCGGCTGCACGACGTGCTGATGGCCGCTAGCGCCCGG
AGCGTGGAGAAGTGGCGGCGGTTCCACTACGACATCAAGATCTTCAACCAGTGGCTGACCGAGGCCGAGCAGTTC
CTGCGGAAGACCCAGATCCCCGAGAACTGGGAGCACGCCAAGTACAAGTGGTACCTGAAGGAGCTGCAGGACGGC
ATCGGCCAGCGGCAGACCGTGGTGCGGACCCTGAACGCCACCGGCGAGGAGATCATCCAGCAGAGCAGCAAGACC
GACGCCAGCATCCTGCAGGAGAAGCTGGGCAGCCTGAACCTGCGGTGGCAGGAGGTGTGCAAGCAGCTGAGCGAC
CGGAAGAAGCGGCTGGAGGAGCAGAAGAACATCCTGAGCGAGTTCCAGCGGGACCTGAACGAGTTCGTGCTGTGG
CTGGAGGAGGCCGACAACATCGCCAGCATCCCCCTGGAGCCCGGCAAGGAGCAGCAGCTGAAGGAGAAGCTGGAG
CAGGTGAAGCTGCTGGTGGAGGAGCTGCCCCTGCGGCAGGGCATCCTGAAGCAGCTGAACGAGACCGGCGGCCCC
GTGCTGGTGAGCGCCCCCATCAGCCCCGAGGAGCAGGACAAGCTGGAGAACAAGCTGAAGCAGACCAACCTGCAG
TGGATCAAGGTGAGCCGGGCCCTGCCCGAGAAGCAGGGCGAGATCGAGGCCCAGATCAAGGACCTGGGCCAGCTG
GAGAAGAAGCTGGAGGACCTGGAGGAGCAGCTGAACCACCTGCTGCTGTGGCTGAGCCCCATCCGGAACCAGCTG
GAGATCTACAACCAGCCCAACCAGGAGGGCCCCTTCGACGTGAAGGAGACCGAGATCGCCGTGCAGGCCAAGCAG
CCCGACGTGGAGGAGATCCTGAGCAAGGGCCAGCACCTGTACAAGGAGAAGCCCGCCACCCAGCCCGTGAAGCGG
AAGCTGGAGGACCTGAGCAGCGAGTGGAAGGCCGTGAACCGGCTGCTGCAGGAGCTGCGGGCCAAGCAGGGTCCA
GCATCTCAGCACTTTCTTTCCACGTCTGTCCAGGGTCCCTGGGAGAGAGCCATCTCGCCAAACAAAGTGCCCTAC
TATATCAACCACGAGACTCAAACAACTTGCTGGGACCATCCCAAAATGACAGAGCTCTACCAGTCTTTAGCTGAC
CTGAATAATGTCAGATTCTCAGCTTATAGGACTGCCATGAAACTCCGAAGACTGCAGAAGGCCCTTTGCTTGGAT
CTCTTGAGCCTGTCAGCTGCATGTGATGCCTTGGACCAGCACAACCTCAAGCAAAATGACCAGCCCATGGATATC
CTGCAGATTATTAATTGTTTGACCACTATTTATGACCGCCTGGAGCAAGAGCACAACAATTTGGTCAACGTCCCT
CTCTGCGTGGATATGTGTCTGAACTGGCTGCTGAATGTTTATGATACGGGACGAACAGGGAGGATCCGTGTCCTG
TCTTTTAAAACTGGCATCATTTCCCTGTGTAAAGCACATTTGGAAGACAAGTACAGATACCTTTTCAAGCAAGTG
GCAAGTTCAACAGGATTTTGTGACCAGCGCAGGCTGGGCCTCCTTCTGCATGATTCTATCCAAATTCCAAGACAG
TTGGGTGAAGTTGCATCCTTTGGGGGCAGTAACATTGAGCCAAGTGTCCGGAGCTGCTTCCAATTTGCTAATAAT
AAGCCAGAGATCGAAGCGGCCCTCTTCCTAGACTGGATGAGACTGGAACCCCAGTCCATGGTGTGGCTGCCCGTC
CTGCACAGAGTGGCTGCTGCAGAAACTGCCAAGCATCAGGCCAAATGTAACATCTGCAAAGAGTGTCCAATCATT
GGATTCAGGTACAGGAGTCTAAAGCACTTTAATTATGACATCTGCCAAAGCTGCTTTTTTTCTGGTCGAGTTGCA
AAAGGCCATAAAATGCACTATCCCATGGTGGAATATTGCACTCCGACTACATCAGGAGAAGATGTTCGAGACTTT
GCCAAGGTACTAAAAAACAAATTTCGAACCAAAAGGTATTTTGCGAAGCATCCCCGAATGGGCTACCTGCCAGTG
CAGACTGTCTTAGAGGGGGACAACATGGAAACTCCCGTTACTCTGATCAACTTCTGGCCAGTAGATTCTGCGCCT
GCCTCGTCCCCTCAGCTTTCACACGATGATACTCATTCACGCATTGAACATTATGCTAGCAGGCTAGCAGAAATG
GAAAACAGCAATGGATCTTATCTAAATGATAGCATCTCTCCTAATGAGAGCATAGATGATGAACATTTGTTAATC
CAGCATTACTGCCAAAGTTTGAACCAGGACTCCCCCCTGAGCCAGCCTCGTAGTCCTGCCCAGATCTTGATTTCC
TTAGAGAGTGAGGAAAGAGGGGAGCTAGAGAGAATCCTAGCAGATCTTGAGGAAGAAAACAGGAATCTGCAAGCA
GAATATGACCGTCTAAAGCAGCAGCACGAACATAAAGGCCTGTCCCCACTGCCGTCCCCTCCTGAAATGATGCCC
ACCTCTCCCCAGAGTCCC
Utrophin N-terminus through R1_Dystrophin R17-R19_H4 to end of
syntrophin region:
Human Sequences without codon alterations:
(SEQ ID NO: 89)
ATGGCCAAGTATGGAGAACATGAAGCCAGTCCTGACAATGGGCAGAACGAATTCAGTGATATCATTAAGTCCAGA
TCTGATGAACACAATGACGTACAGAAGAAAACCTTTACCAAATGGATAAATGCTCGATTTTCAAAGAGTGGGAAA
CCACCCATCAATGATATGTTCACAGACCTCAAAGATGGAAGGAAGCTATTGGATCTTCTAGAAGGCCTCACAGGA
ACATCACTGCCAAAGGAACGTGGTTCCACAAGGGTACATGCCTTAAATAACGTCAACAGAGTGCTGCAGGTTTTA
CATCAGAACAATGTGGAATTAGTGAATATAGGGGGAACTGACATTGTGGATGGAAATCACAAACTGACTTTGGGG
TTACTTTGGAGCATCATTTTGCACTGGCAGGTGAAAGATGTCATGAAGGATGTCATGTCGGACCTGCAGCAGACG
AACAGTGAGAAGATCCTGCTCAGCTGGGTGCGTCAGACCACCAGGCCCTACAGCCAAGTCAACGTCCTCAACTTC
ACCACCAGCTGGACAGATGGACTCGCCTTTAATGCTGTCCTCCACCGACATAAACCTGATCTCTTCAGCTGGGAT
AAAGTTGTCAAAATGTCACCAATTGAGAGACTTGAACATGCCTTCAGCAAGGCTCAAACTTATTTGGGAATTGAA
AAGCTGTTAGATCCTGAAGATGTTGCCGTTCAGCTTCCTGACAAGAAATCCATAATTATGTATTTAACATCTTTG
TTTGAGGTGCTACCTCAGCAAGTCACCATAGACGCCATCCGTGAGGTAGAGACACTCCCAAGGAAATATAAAAAA
GAATGTGAAGAAGAGGCAATTAATATACAGAGTACAGCGCCTGAGGAGGAGCATGAGAGTCCCCGAGCTGAAACT
CCCAGCACTGTCACTGAGGTTGACATGGATCTGGACAGCTATCAGATTGCGTTGGAGGAAGTGCTGACCTGGTTG
CTTTCTGCTGAGGACACTTTCCAGGAGCAGGATGATATTTCTGATGATGTTGAAGAAGTCAAAGACCAGTTTGCA
ACCCATGAAGCTTTTATGATGGAACTGACTGCACACCAGAGCAGTGTGGGCAGCGTCCTGCAGGCAGGCAACCAA
CTGATAACACAAGGAACTCTGTCAGACGAAGAAGAATTTGAGATTCAGGAACAGATGACCCTGCTGAATGCTAGA
TGGGAGGCTCTTAGGGTGGAGAGTATGGACAGACAGTCCCGGCTGCACGATGTGCTGATGGCCGCTAGCGCCAGA
TCTGTTGAGAAATGGCGGCGTTTTCATTATGATATAAAGATATTTAATCAGTGGCTAACAGAAGCTGAACAGTTT
CTCAGAAAGACACAAATTCCTGAGAATTGGGAACATGCTAAATACAAATGGTATCTTAAGGAACTCCAGGATGGC
ATTGGGCAGCGGCAAACTGTTGTCAGAACATTGAATGCAACTGGGGAAGAAATAATTCAGCAATCCTCAAAAACA
GATGCCAGTATTCTACAGGAAAAATTGGGAAGCCTGAATCTGCGGTGGCAGGAGGTCTGCAAACAGCTGTCAGAC
AGAAAAAAGAGGCTAGAAGAACAAAAGAATATCTTGTCAGAATTTCAAAGAGATTTAAATGAATTTGTTTTATGG
TTGGAGGAAGCAGATAACATTGCTAGTATCCCACTTGAACCTGGAAAAGAGCAGCAACTAAAAGAAAAGCTTGAG
CAAGTCAAGTTACTGGTGGAAGAGTTGCCCCTGCGCCAGGGAATTCTCAAACAATTAAATGAAACTGGAGGACCC
GTGCTTGTAAGTGCTCCCATAAGCCCAGAAGAGCAAGATAAACTTGAAAATAAGCTCAAGCAGACAAATCTCCAG
TGGATAAAGGTTTCCAGAGCTTTACCTGAGAAACAAGGAGAAATTGAAGCTCAAATAAAAGACCTTGGGCAGCTT
GAAAAAAAGCTTGAAGACCTTGAAGAGCAGTTAAATCATCTGCTGCTGTGGTTATCTCCTATTAGGAATCAGTTG
GAAATTTATAACCAACCAAACCAAGAAGGACCATTTGACGTTAAGGAAACTGAAATAGCAGTTCAAGCTAAACAA
CCGGATGTGGAAGAGATTTTGTCTAAAGGGCAGCATTTGTACAAGGAAAAACCAGCCACTCAGCCAGTGAAGAGG
AAGTTAGAAGATCTGAGCTCTGAGTGGAAGGCGGTAAACCGTTTACTTCAAGAGCTGAGGGCAAAGCAGGGTCCA
GCATCTCAGCACTTTCTTTCCACGTCTGTCCAGGGTCCCTGGGAGAGAGCCATCTCGCCAAACAAAGTGCCCTAC
TATATCAACCACGAGACTCAAACAACTTGCTGGGACCATCCCAAAATGACAGAGCTCTACCAGTCTTTAGCTGAC
CTGAATAATGTCAGATTCTCAGCTTATAGGACTGCCATGAAACTCCGAAGACTGCAGAAGGCCCTTTGCTTGGAT
CTCTTGAGCCTGTCAGCTGCATGTGATGCCTTGGACCAGCACAACCTCAAGCAAAATGACCAGCCCATGGATATC
CTGCAGATTATTAATTGTTTGACCACTATTTATGACCGCCTGGAGCAAGAGCACAACAATTTGGTCAACGTCCCT
CTCTGCGTGGATATGTGTCTGAACTGGCTGCTGAATGTTTATGATACGGGACGAACAGGGAGGATCCGTGTCCTG
TCTTTTAAAACTGGCATCATTTCCCTGTGTAAAGCACATTTGGAAGACAAGTACAGATACCTTTTCAAGCAAGTG
GCAAGTTCAACAGGATTTTGTGACCAGCGCAGGCTGGGCCTCCTTCTGCATGATTCTATCCAAATTCCAAGACAG
TTGGGTGAAGTTGCATCCTTTGGGGGCAGTAACATTGAGCCAAGTGTCCGGAGCTGCTTCCAATTTGCTAATAAT
AAGCCAGAGATCGAAGCGGCCCTCTTCCTAGACTGGATGAGACTGGAACCCCAGTCCATGGTGTGGCTGCCCGTC
CTGCACAGAGTGGCTGCTGCAGAAACTGCCAAGCATCAGGCCAAATGTAACATCTGCAAAGAGTGTCCAATCATT
GGATTCAGGTACAGGAGTCTAAAGCACTTTAATTATGACATCTGCCAAAGCTGCTTTTTTTCTGGTCGAGTTGCA
AAAGGCCATAAAATGCACTATCCCATGGTGGAATATTGCACTCCGACTACATCAGGAGAAGATGTTCGAGACTTT
GCCAAGGTACTAAAAAACAAATTTCGAACCAAAAGGTATTTTGCGAAGCATCCCCGAATGGGCTACCTGCCAGTG
CAGACTGTCTTAGAGGGGGACAACATGGAAACTCCCGTTACTCTGATCAACTTCTGGCCAGTAGATTCTGCGCCT
GCCTCGTCCCCTCAGCTTTCACACGATGATACTCATTCACGCATTGAACATTATGCTAGCAGGCTAGCAGAAATG
GAAAACAGCAATGGATCTTATCTAAATGATAGCATCTCTCCTAATGAGAGCATAGATGATGAACATTTGTTAATC
CAGCATTACTGCCAAAGTTTGAACCAGGACTCCCCCCTGAGCCAGCCTCGTAGT
Human Sequences without codon alterations:
(SEQ ID NO: 90)
ATGGCCAAGTACGGCGAGCACGAGGCCAGCCCCGACAACGGCCAGAACGAGTTCAGCGACATCATCAAGAGCCGG
AGCGACGAGCACAACGACGTGCAGAAGAAGACCTTCACCAAGTGGATCAACGCCCGGTTCAGCAAGAGCGGCAAG
CCCCCCATCAACGACATGTTCACCGACCTGAAGGACGGCCGGAAGCTGCTGGACCTGCTGGAGGGCCTGACCGGC
ACCAGCCTGCCCAAGGAGCGGGGCAGCACCCGGGTGCACGCCCTGAACAACGTGAACCGGGTGCTGCAGGTGCTG
CACCAGAACAACGTGGAGCTGGTGAACATCGGCGGCACCGACATCGTGGACGGCAACCACAAGCTGACCCTGGGC
CTGCTGTGGAGCATCATCCTGCACTGGCAGGTGAAGGACGTGATGAAGGACGTGATGAGCGACCTGCAGCAGACC
AACAGCGAGAAGATCCTGCTGAGCTGGGTGCGGCAGACCACCCGGCCCTACAGCCAGGTGAACGTGCTGAACTTC
ACCACCAGCTGGACCGACGGCCTGGCCTTCAACGCCGTGCTGCACCGGCACAAGCCCGACCTGTTCAGCTGGGAC
AAGGTGGTGAAGATGAGCCCCATCGAGCGGCTGGAGCACGCCTTCAGCAAGGCCCAGACCTACCTGGGCATCGAG
AAGCTGCTGGACCCCGAGGACGTGGCCGTGCAGCTGCCCGACAAGAAGAGCATCATCATGTACCTGACCAGCCTG
TTCGAGGTGCTGCCCCAGCAGGTGACCATCGACGCCATCCGGGAGGTGGAGACCCTGCCCCGGAAGTACAAGAAG
GAGTGCGAGGAGGAGGCCATCAACATCCAGAGCACCGCCCCCGAGGAGGAGCACGAGAGCCCCCGGGCCGAGACC
CCCAGCACCGTGACCGAGGTGGACATGGACCTGGACAGCTACCAGATCGCCCTGGAGGAGGTGCTGACCTGGCTG
CTGAGCGCCGAGGACACCTTCCAGGAGCAGGACGACATCAGCGACGACGTGGAGGAGGTGAAGGACCAGTTCGCC
ACCCACGAGGCCTTCATGATGGAGCTGACCGCCCACCAGAGCAGCGTGGGCAGCGTGCTGCAGGCCGGCAACCAG
CTGATCACCCAGGGCACCCTGAGCGACGAGGAGGAGTTCGAGATCCAGGAGCAGATGACCCTGCTGAACGCCCGG
TGGGAGGCCCTGCGGGTGGAGAGCATGGACCGGCAGAGCCGGCTGCACGACGTGCTGATGGCCGCTAGCGCCCGG
AGCGTGGAGAAGTGGCGGCGGTTCCACTACGACATCAAGATCTTCAACCAGTGGCTGACCGAGGCCGAGCAGTTC
CTGCGGAAGACCCAGATCCCCGAGAACTGGGAGCACGCCAAGTACAAGTGGTACCTGAAGGAGCTGCAGGACGGC
ATCGGCCAGCGGCAGACCGTGGTGCGGACCCTGAACGCCACCGGCGAGGAGATCATCCAGCAGAGCAGCAAGACC
GACGCCAGCATCCTGCAGGAGAAGCTGGGCAGCCTGAACCTGCGGTGGCAGGAGGTGTGCAAGCAGCTGAGCGAC
CGGAAGAAGCGGCTGGAGGAGCAGAAGAACATCCTGAGCGAGTTCCAGCGGGACCTGAACGAGTTCGTGCTGTGG
CTGGAGGAGGCCGACAACATCGCCAGCATCCCCCTGGAGCCCGGCAAGGAGCAGCAGCTGAAGGAGAAGCTGGAG
CAGGTGAAGCTGCTGGTGGAGGAGCTGCCCCTGCGGCAGGGCATCCTGAAGCAGCTGAACGAGACCGGCGGCCCC
GTGCTGGTGAGCGCCCCCATCAGCCCCGAGGAGCAGGACAAGCTGGAGAACAAGCTGAAGCAGACCAACCTGCAG
TGGATCAAGGTGAGCCGGGCCCTGCCCGAGAAGCAGGGCGAGATCGAGGCCCAGATCAAGGACCTGGGCCAGCTG
GAGAAGAAGCTGGAGGACCTGGAGGAGCAGCTGAACCACCTGCTGCTGTGGCTGAGCCCCATCCGGAACCAGCTG
GAGATCTACAACCAGCCCAACCAGGAGGGCCCCTTCGACGTGAAGGAGACCGAGATCGCCGTGCAGGCCAAGCAG
CCCGACGTGGAGGAGATCCTGAGCAAGGGCCAGCACCTGTACAAGGAGAAGCCCGCCACCCAGCCCGTGAAGCGG
AAGCTGGAGGACCTGAGCAGCGAGTGGAAGGCCGTGAACCGGCTGCTGCAGGAGCTGCGGGCCAAGCAGGGTCCA
GCATCTCAGCACTTTCTTTCCACGTCTGTCCAGGGTCCCTGGGAGAGAGCCATCTCGCCAAACAAAGTGCCCTAC
TATATCAACCACGAGACTCAAACAACTTGCTGGGACCATCCCAAAATGACAGAGCTCTACCAGTCTTTAGCTGAC
CTGAATAATGTCAGATTCTCAGCTTATAGGACTGCCATGAAACTCCGAAGACTGCAGAAGGCCCTTTGCTTGGAT
CTCTTGAGCCTGTCAGCTGCATGTGATGCCTTGGACCAGCACAACCTCAAGCAAAATGACCAGCCCATGGATATC
CTGCAGATTATTAATTGTTTGACCACTATTTATGACCGCCTGGAGCAAGAGCACAACAATTTGGTCAACGTCCCT
CTCTGCGTGGATATGTGTCTGAACTGGCTGCTGAATGTTTATGATACGGGACGAACAGGGAGGATCCGTGTCCTG
TCTTTTAAAACTGGCATCATTTCCCTGTGTAAAGCACATTTGGAAGACAAGTACAGATACCTTTTCAAGCAAGTG
GCAAGTTCAACAGGATTTTGTGACCAGCGCAGGCTGGGCCTCCTTCTGCATGATTCTATCCAAATTCCAAGACAG
TTGGGTGAAGTTGCATCCTTTGGGGGCAGTAACATTGAGCCAAGTGTCCGGAGCTGCTTCCAATTTGCTAATAAT
AAGCCAGAGATCGAAGCGGCCCTCTTCCTAGACTGGATGAGACTGGAACCCCAGTCCATGGTGTGGCTGCCCGTC
CTGCACAGAGTGGCTGCTGCAGAAACTGCCAAGCATCAGGCCAAATGTAACATCTGCAAAGAGTGTCCAATCATT
GGATTCAGGTACAGGAGTCTAAAGCACTTTAATTATGACATCTGCCAAAGCTGCTTTTTTTCTGGTCGAGTTGCA
AAAGGCCATAAAATGCACTATCCCATGGTGGAATATTGCACTCCGACTACATCAGGAGAAGATGTTCGAGACTTT
GCCAAGGTACTAAAAAACAAATTTCGAACCAAAAGGTATTTTGCGAAGCATCCCCGAATGGGCTACCTGCCAGTG
CAGACTGTCTTAGAGGGGGACAACATGGAAACTCCCGTTACTCTGATCAACTTCTGGCCAGTAGATTCTGCGCCT
GCCTCGTCCCCTCAGCTTTCACACGATGATACTCATTCACGCATTGAACATTATGCTAGCAGGCTAGCAGAAATG
GAAAACAGCAATGGATCTTATCTAAATGATAGCATCTCTCCTAATGAGAGCATAGATGATGAACATTTGTTAATC
CAGCATTACTGCCAAAGTTTGAACCAGGACTCCCCCCTGAGCCAGCCTCGTAGT
Utrophin N-terminus through R1_Dystrophin R23 to end of Dystrophin:
Human Sequences without codon alterations:
(SEQ ID NO: 91)
ATGGCCAAGTATGGAGAACATGAAGCCAGTCCTGACAATGGGCAGAACGAATTCAGTGATATCATTAAGTCCAGA
TCTGATGAACACAATGACGTACAGAAGAAAACCTTTACCAAATGGATAAATGCTCGATTTTCAAAGAGTGGGAAA
CCACCCATCAATGATATGTTCACAGACCTCAAAGATGGAAGGAAGCTATTGGATCTTCTAGAAGGCCTCACAGGA
ACATCACTGCCAAAGGAACGTGGTTCCACAAGGGTACATGCCTTAAATAACGTCAACAGAGTGCTGCAGGTTTTA
CATCAGAACAATGTGGAATTAGTGAATATAGGGGGAACTGACATTGTGGATGGAAATCACAAACTGACTTTGGGG
TTACTTTGGAGCATCATTTTGCACTGGCAGGTGAAAGATGTCATGAAGGATGTCATGTCGGACCTGCAGCAGACG
AACAGTGAGAAGATCCTGCTCAGCTGGGTGCGTCAGACCACCAGGCCCTACAGCCAAGTCAACGTCCTCAACTTC
ACCACCAGCTGGACAGATGGACTCGCCTTTAATGCTGTCCTCCACCGACATAAACCTGATCTCTTCAGCTGGGAT
AAAGTTGTCAAAATGTCACCAATTGAGAGACTTGAACATGCCTTCAGCAAGGCTCAAACTTATTTGGGAATTGAA
AAGCTGTTAGATCCTGAAGATGTTGCCGTTCAGCTTCCTGACAAGAAATCCATAATTATGTATTTAACATCTTTG
TTTGAGGTGCTACCTCAGCAAGTCACCATAGACGCCATCCGTGAGGTAGAGACACTCCCAAGGAAATATAAAAAA
GAATGTGAAGAAGAGGCAATTAATATACAGAGTACAGCGCCTGAGGAGGAGCATGAGAGTCCCCGAGCTGAAACT
CCCAGCACTGTCACTGAGGTTGACATGGATCTGGACAGCTATCAGATTGCGTTGGAGGAAGTGCTGACCTGGTTG
CTTTCTGCTGAGGACACTTTCCAGGAGCAGGATGATATTTCTGATGATGTTGAAGAAGTCAAAGACCAGTTTGCA
ACCCATGAAGCTTTTATGATGGAACTGACTGCACACCAGAGCAGTGTGGGCAGCGTCCTGCAGGCAGGCAACCAA
CTGATAACACAAGGAACTCTGTCAGACGAAGAAGAATTTGAGATTCAGGAACAGATGACCCTGCTGAATGCTAGA
TGGGAGGCTCTTAGGGTGGAGAGTATGGACAGACAGTCCCGGCTGCACGATGTGCTGATGGCCGCTAGCGCCAGT
TCTGACCAGTGGAAGCGTCTGCACCTTTCTCTGCAGGAACTTCTGGTGTGGCTACAGCTGAAAGATGATGAATTA
AGCCGGCAGGCACCTATTGGAGGCGACTTTCCAGCAGTTCAGAAGCAGAACGATGTACATAGGGCCTTCAAGAGG
GAATTGAAAACTAAAGAACCTGTAATCATGAGTACTCTTGAGACTGTACGAATATTTCTGACAGAGCAGCCTTTG
GAAGGACTAGAGAAACTCTACCAGGAGCCCAGAGAGCTGCCTCCTGAGGAGAGAGCCCAGAATGTCACTCGGCTT
CTACGAAAGCAGGCTGAGGAGGTCAATACTGAGTGGGAAAAATTGAACCTGCACTCCGCTGACTGGCAGAGAAAA
ATAGATGAGACCCTTGAAAGACTCCGGGAACTTCAAGAGGCCACGGATGAGCTGGACCTCAAGCTGCGCCAAGCT
GAGGTGATCAAGGGATCCTGGCAGCCCGTGGGCGATCTCCTCATTGACTCTCTCCAAGATCACCTCGAGAAAGTC
AAGGCACTTCGAGGAGAAATTGCGCCTCTGAAAGAGAACGTGAGCCACGTCAATGACCTTGCTCGCCAGCTTACC
ACTTTGGGCATTCAGCTCTCACCGTATAACCTCAGCACTCTGGAAGACCTGAACACCAGATGGAAGCTTCTGCAG
GTGGCCGTCGAGGACCGAGTCAGGCAGCTGCATGAAGCCCACAGGGACTTTGGTCCAGCATCTCAGCACTTTCTT
TCCACGTCTGTCCAGGGTCCCTGGGAGAGAGCCATCTCGCCAAACAAAGTGCCCTACTATATCAACCACGAGACT
CAAACAACTTGCTGGGACCATCCCAAAATGACAGAGCTCTACCAGTCTTTAGCTGACCTGAATAATGTCAGATTC
TCAGCTTATAGGACTGCCATGAAACTCCGAAGACTGCAGAAGGCCCTTTGCTTGGATCTCTTGAGCCTGTCAGCT
GCATGTGATGCCTTGGACCAGCACAACCTCAAGCAAAATGACCAGCCCATGGATATCCTGCAGATTATTAATTGT
TTGACCACTATTTATGACCGCCTGGAGCAAGAGCACAACAATTTGGTCAACGTCCCTCTCTGCGTGGATATGTGT
CTGAACTGGCTGCTGAATGTTTATGATACGGGACGAACAGGGAGGATCCGTGTCCTGTCTTTTAAAACTGGCATC
ATTTCCCTGTGTAAAGCACATTTGGAAGACAAGTACAGATACCTTTTCAAGCAAGTGGCAAGTTCAACAGGATTT
TGTGACCAGCGCAGGCTGGGCCTCCTTCTGCATGATTCTATCCAAATTCCAAGACAGTTGGGTGAAGTTGCATCC
TTTGGGGGCAGTAACATTGAGCCAAGTGTCCGGAGCTGCTTCCAATTTGCTAATAATAAGCCAGAGATCGAAGCG
GCCCTCTTCCTAGACTGGATGAGACTGGAACCCCAGTCCATGGTGTGGCTGCCCGTCCTGCACAGAGTGGCTGCT
GCAGAAACTGCCAAGCATCAGGCCAAATGTAACATCTGCAAAGAGTGTCCAATCATTGGATTCAGGTACAGGAGT
CTAAAGCACTTTAATTATGACATCTGCCAAAGCTGCTTTTTTTCTGGTCGAGTTGCAAAAGGCCATAAAATGCAC
TATCCCATGGTGGAATATTGCACTCCGACTACATCAGGAGAAGATGTTCGAGACTTTGCCAAGGTACTAAAAAAC
AAATTTCGAACCAAAAGGTATTTTGCGAAGCATCCCCGAATGGGCTACCTGCCAGTGCAGACTGTCTTAGAGGGG
GACAACATGGAAACTCCCGTTACTCTGATCAACTTCTGGCCAGTAGATTCTGCGCCTGCCTCGTCCCCTCAGCTT
TCACACGATGATACTCATTCACGCATTGAACATTATGCTAGCAGGCTAGCAGAAATGGAAAACAGCAATGGATCT
TATCTAAATGATAGCATCTCTCCTAATGAGAGCATAGATGATGAACATTTGTTAATCCAGCATTACTGCCAAAGT
TTGAACCAGGACTCCCCCCTGAGCCAGCCTCGTAGTCCTGCCCAGATCTTGATTTCCTTAGAGAGTGAGGAAAGA
GGGGAGCTAGAGAGAATCCTAGCAGATCTTGAGGAAGAAAACAGGAATCTGCAAGCAGAATATGACCGTCTAAAG
CAGCAGCACGAACATAAAGGCCTGTCCCCACTGCCGTCCCCTCCTGAAATGATGCCCACCTCTCCCCAGAGTCCC
CGGGATGCTGAGCTCATTGCTGAGGCCAAGCTACTGCGTCAACACAAAGGCCGCCTGGAAGCCAGGATGCAAATC
CTGGAAGACCACAATAAACAGCTGGAGTCACAGTTACACAGGCTAAGGCAGCTGCTGGAGCAACCCCAGGCAGAG
GCCAAAGTGAATGGCACAACGGTGTCCTCTCCTTCTACCTCTCTACAGAGGTCCGACAGCAGTCAGCCTATGCTG
CTCCGAGTGGTTGGCAGTCAAACTTCGGACTCCATGGGTGAGGAAGATCTTCTCAGTCCTCCCCAGGACACAAGC
ACAGGGTTAGAGGAGGTGATGGAGCAACTCAACAACTCCTTCCCTAGTTCAAGAGGAAGAAATACCCCTGGAAAG
CCAATGAGAGAGGACACAATG
Human Sequences without codon alterations:
(SEQ ID NO: 92)
ATGGCCAAGTACGGCGAGCACGAGGCCAGCCCCGACAACGGCCAGAACGAGTTCAGCGACATCATCAAGAGCCGG
AGCGACGAGCACAACGACGTGCAGAAGAAGACCTTCACCAAGTGGATCAACGCCCGGTTCAGCAAGAGCGGCAAG
CCCCCCATCAACGACATGTTCACCGACCTGAAGGACGGCCGGAAGCTGCTGGACCTGCTGGAGGGCCTGACCGGC
ACCAGCCTGCCCAAGGAGCGGGGCAGCACCCGGGTGCACGCCCTGAACAACGTGAACCGGGTGCTGCAGGTGCTG
CACCAGAACAACGTGGAGCTGGTGAACATCGGCGGCACCGACATCGTGGACGGCAACCACAAGCTGACCCTGGGC
CTGCTGTGGAGCATCATCCTGCACTGGCAGGTGAAGGACGTGATGAAGGACGTGATGAGCGACCTGCAGCAGACC
AACAGCGAGAAGATCCTGCTGAGCTGGGTGCGGCAGACCACCCGGCCCTACAGCCAGGTGAACGTGCTGAACTTC
ACCACCAGCTGGACCGACGGCCTGGCCTTCAACGCCGTGCTGCACCGGCACAAGCCCGACCTGTTCAGCTGGGAC
AAGGTGGTGAAGATGAGCCCCATCGAGCGGCTGGAGCACGCCTTCAGCAAGGCCCAGACCTACCTGGGCATCGAG
AAGCTGCTGGACCCCGAGGACGTGGCCGTGCAGCTGCCCGACAAGAAGAGCATCATCATGTACCTGACCAGCCTG
TTCGAGGTGCTGCCCCAGCAGGTGACCATCGACGCCATCCGGGAGGTGGAGACCCTGCCCCGGAAGTACAAGAAG
GAGTGCGAGGAGGAGGCCATCAACATCCAGAGCACCGCCCCCGAGGAGGAGCACGAGAGCCCCCGGGCCGAGACC
CCCAGCACCGTGACCGAGGTGGACATGGACCTGGACAGCTACCAGATCGCCCTGGAGGAGGTGCTGACCTGGCTG
CTGAGCGCCGAGGACACCTTCCAGGAGCAGGACGACATCAGCGACGACGTGGAGGAGGTGAAGGACCAGTTCGCC
ACCCACGAGGCCTTCATGATGGAGCTGACCGCCCACCAGAGCAGCGTGGGCAGCGTGCTGCAGGCCGGCAACCAG
CTGATCACCCAGGGCACCCTGAGCGACGAGGAGGAGTTCGAGATCCAGGAGCAGATGACCCTGCTGAACGCCCGG
TGGGAGGCCCTGCGGGTGGAGAGCATGGACCGGCAGAGCCGGCTGCACGACGTGCTGATGGCCGCTAGCGCCAGC
AGCGACCAGTGGAAGCGGCTGCACCTGAGCCTGCAGGAGCTGCTGGTGTGGCTGCAGCTGAAGGACGACGAGCTG
AGCCGGCAGGCCCCCATCGGCGGCGACTTCCCCGCCGTGCAGAAGCAGAACGACGTGCACCGGGCCTTCAAGCGG
GAGCTGAAGACCAAGGAGCCCGTGATCATGAGCACCCTGGAGACCGTGCGGATCTTCCTGACCGAGCAGCCCCTG
GAGGGCCTGGAGAAGCTGTACCAGGAGCCCCGGGAGCTGCCCCCCGAGGAGCGGGCCCAGAACGTGACCCGGCTG
CTGCGGAAGCAGGCCGAGGAGGTGAACACCGAGTGGGAGAAGCTGAACCTGCACAGCGCCGACTGGCAGAGAAAA
ATAGATGAGACCCTTGAAAGACTCCGGGAACTTCAAGAGGCCACGGATGAGCTGGACCTCAAGCTGCGCCAAGCT
GAGGTGATCAAGGGATCCTGGCAGCCCGTGGGCGATCTCCTCATTGACTCTCTCCAAGATCACCTCGAGAAAGTC
AAGGCACTTCGAGGAGAAATTGCGCCTCTGAAAGAGAACGTGAGCCACGTCAATGACCTTGCTCGCCAGCTTACC
ACTTTGGGCATTCAGCTCTCACCGTATAACCTCAGCACTCTGGAAGACCTGAACACCAGATGGAAGCTTCTGCAG
GTGGCCGTCGAGGACCGAGTCAGGCAGCTGCATGAAGCCCACAGGGACTTTGGTCCAGCATCTCAGCACTTTCTT
TCCACGTCTGTCCAGGGTCCCTGGGAGAGAGCCATCTCGCCAAACAAAGTGCCCTACTATATCAACCACGAGACT
CAAACAACTTGCTGGGACCATCCCAAAATGACAGAGCTCTACCAGTCTTTAGCTGACCTGAATAATGTCAGATTC
TCAGCTTATAGGACTGCCATGAAACTCCGAAGACTGCAGAAGGCCCTTTGCTTGGATCTCTTGAGCCTGTCAGCT
GCATGTGATGCCTTGGACCAGCACAACCTCAAGCAAAATGACCAGCCCATGGATATCCTGCAGATTATTAATTGT
TTGACCACTATTTATGACCGCCTGGAGCAAGAGCACAACAATTTGGTCAACGTCCCTCTCTGCGTGGATATGTGT
CTGAACTGGCTGCTGAATGTTTATGATACGGGACGAACAGGGAGGATCCGTGTCCTGTCTTTTAAAACTGGCATC
ATTTCCCTGTGTAAAGCACATTTGGAAGACAAGTACAGATACCTTTTCAAGCAAGTGGCAAGTTCAACAGGATTT
TGTGACCAGCGCAGGCTGGGCCTCCTTCTGCATGATTCTATCCAAATTCCAAGACAGTTGGGTGAAGTTGCATCC
TTTGGGGGCAGTAACATTGAGCCAAGTGTCCGGAGCTGCTTCCAATTTGCTAATAATAAGCCAGAGATCGAAGCG
GCCCTCTTCCTAGACTGGATGAGACTGGAACCCCAGTCCATGGTGTGGCTGCCCGTCCTGCACAGAGTGGCTGCT
GCAGAAACTGCCAAGCATCAGGCCAAATGTAACATCTGCAAAGAGTGTCCAATCATTGGATTCAGGTACAGGAGT
CTAAAGCACTTTAATTATGACATCTGCCAAAGCTGCTTTTTTTCTGGTCGAGTTGCAAAAGGCCATAAAATGCAC
TATCCCATGGTGGAATATTGCACTCCGACTACATCAGGAGAAGATGTTCGAGACTTTGCCAAGGTACTAAAAAAC
AAATTTCGAACCAAAAGGTATTTTGCGAAGCATCCCCGAATGGGCTACCTGCCAGTGCAGACTGTCTTAGAGGGG
GACAACATGGAAACTCCCGTTACTCTGATCAACTTCTGGCCAGTAGATTCTGCGCCTGCCTCGTCCCCTCAGCTT
TCACACGATGATACTCATTCACGCATTGAACATTATGCTAGCAGGCTAGCAGAAATGGAAAACAGCAATGGATCT
TATCTAAATGATAGCATCTCTCCTAATGAGAGCATAGATGATGAACATTTGTTAATCCAGCATTACTGCCAAAGT
TTGAACCAGGACTCCCCCCTGAGCCAGCCTCGTAGTCCTGCCCAGATCTTGATTTCCTTAGAGAGTGAGGAAAGA
GGGGAGCTAGAGAGAATCCTAGCAGATCTTGAGGAAGAAAACAGGAATCTGCAAGCAGAATATGACCGTCTAAAG
CAGCAGCACGAACATAAAGGCCTGTCCCCACTGCCGTCCCCTCCTGAAATGATGCCCACCTCTCCCCAGAGTCCC
CGGGATGCTGAGCTCATTGCTGAGGCCAAGCTACTGCGTCAACACAAAGGCCGCCTGGAAGCCAGGATGCAAATC
CTGGAAGACCACAATAAACAGCTGGAGTCACAGTTACACAGGCTAAGGCAGCTGCTGGAGCAACCCCAGGCAGAG
GCCAAAGTGAATGGCACAACGGTGTCCTCTCCTTCTACCTCTCTACAGAGGTCCGACAGCAGTCAGCCTATGCTG
CTCCGAGTGGTTGGCAGTCAAACTTCGGACTCCATGGGTGAGGAAGATCTTCTCAGTCCTCCCCAGGACACAAGC
ACAGGGTTAGAGGAGGTGATGGAGCAACTCAACAACTCCTTCCCTAGTTCAAGAGGAAGAAATACCCCTGGAAAG
CCAATGAGAGAGGACACAATG

### Amino Acid Sequences for Exemplary Chimeric Proteins

[0063] In some embodiments, a micro-dystrophin protein as described herein further comprises one or more utrophin protein domains. In some embodiments, a micro-dystrophin protein optimized for skeletal muscle comprises a utrophin N-terminus. In some embodiments, a micro-dystrophin protein comprises the region of utrophin from the N-terminus to spectrin-like repeat 1. In some embodiments, a micro-dystrophin protein comprises the region of utrophin from the N-terminus to spectrin-like repeat 2. In some embodiments, a micro-dystrophin protein comprises the region of utrophin from the N-terminus to spectrin-like repeat 3. In some embodiments, the micro-dystrophin protein comprises the region of utrophin from the N-terminus to hinge 2.

[0064] Non-limiting examples of human chimeric utrophin/dystrophin micro-dystrophin proteins optimized for skeletal muscle are described below.

Utrophin N-terminus through-R2_Dystrophin R16-R17_R24+H4+trCterm:
(SEQ ID NO: 93)
MAKYGEHEASPDNGQNEFSDIIKSRSDEHNDVQKKTFTKWINARFSKSGKPPINDMFTDLKDGRKLLDLLEGLTG
TSLPKERGSTRVHALNNVNRVLQVLHQNNVELVNIGGTDIVDGNHKLTLGLLWSIILHWQVKDVMKDVMSDLQQT
NSEKILLSWVRQTTRPYSQVNVLNFTTSWTDGLAFNAVLHRHKPDLFSWDKVVKMSPIERLEHAFSKAQTYLGIE
KLLDPEDVAVQLPDKKSIIMYLTSLFEVLPQQVTIDAIREVETLPRKYKKECEEEAINIQSTAPEEEHESPRAET
PSTVTEVDMDLDSYQIALEEVLTWLLSAEDTFQEQDDISDDVEEVKDQFATHEAFMMELTAHQSSVGSVLQAGNQ
LITQGTLSDEEEFEIQEQMTLLNARWEALRVESMDRQSRLHDVLMELQKKQLQQLSAWLTLTEERIQKMETCPLD
DDVKSLQKLLEEHKSLQSDLEAEQVKVNSLTHMVVIVDENSGESATAILEDQLQKLGERWTAVCRWTEERWNRLQ
EIAASAMMVMTEDMPLEISYVPSTYLTEITHVSQALLEVEQLLNAPDLCAKDFEDLFKQEESLKNIKDSLQQSSG
RIDIIHSKKTAALQSATPVERVKLQEALSQLDFQWEKVNKMYKDRQGRFDRSVEKWRRFHYDIKIFNQWLTEAEQ
FLRKTQIPENWEHAKYKWYLKELQDGIGQRQTVVRTLNATGEEIIQQSSKTDASILQEKLGSLNLRWQEVCKQLS
DRKKRLEEQKWQRKIDETLERLQELQEATDELDLKLRQAEVIKGSWQPVGDLLIDSLQDHLEKVKALRGEIAPLK
ENVSHVNDLARQLTTLGIQLSPYNLSTLEDLNTRWKLLQVAVEDRVRQLHEAHRDFGPASQHELSTSVQGPWERA
ISPNKVPYYINHETQTTCWDHPKMTELYQSLADLNNVRFSAYRTAMKLRRLQKALCLDLLSLSAACDALDQHNLK
QNDQPMDILQIINCLTTIYDRLEQEHNNLVNVPLCVDMCLNWLLNVYDTGRTGRIRVLSFKTGIISLCKAHLEDK
YRYLFKQVASSTGFCDQRRLGLLLHDSIQIPRQLGEVASFGGSNIEPSVRSCFQFANNKPEIEAALFLDWMRLEP
QSMVWLPVLHRVAAAETAKHQAKCNICKECPIIGFRYRSLKHENYDICQSCFFSGRVAKGHKMHYPMVEYCTPTT
SGEDVRDFAKVLKNKFRTKRYFAKHPRMGYLPVQTVLEGDNMETP
Utrophin N-terminus through R2_Dystrophin R16-R17_H4 to end of
syntrophin region:
(SEQ ID NO: 94)
MAKYGEHEASPDNGQNEFSDIIKSRSDEHNDVQKKTFTKWINARFSKSGKPPINDMFTDLKDGRKLLDLLEGLTG
TSLPKERGSTRVHALNNVNRVLQVLHQNNVELVNIGGTDIVDGNHKLTLGLLWSIILHWQVKDVMKDVMSDLQQT
NSEKILLSWVRQTTRPYSQVNVLNFTTSWTDGLAFNAVLHRHKPDLFSWDKVVKMSPIERLEHAFSKAQTYLGIE
KLLDPEDVAVQLPDKKSIIMYLTSLFEVLPQQVTIDAIREVETLPRKYKKECEEEAINIQSTAPEEEHESPRAET
PSTVTEVDMDLDSYQIALEEVLTWLLSAEDTFQEQDDISDDVEEVKDQFATHEAFMMELTAHQSSVGSVLQAGNQ
LITQGTLSDEEEFEIQEQMTLLNARWEALRVESMDRQSRLHDVLMELQKKQLQQLSAWLTLTEERIQKMETCPLD
DDVKSLQKLLEEHKSLQSDLEAEQVKVNSLTHMVVIVDENSGESATAILEDQLQKLGERWTAVCRWTEERWNRLQ
EIAASAMMVMTEDMPLEISYVPSTYLTEITHVSQALLEVEQLLNAPDLCAKDFEDLFKQEESLKNIKDSLQQSSG
RIDIIHSKKTAALQSATPVERVKLQEALSQLDFQWEKVNKMYKDRQGRFDRSVEKWRRFHYDIKIFNQWLTEAEQ
FLRKTQIPENWEHAKYKWYLKELQDGIGQRQTVVRTLNATGEEIIQQSSKTDASILQEKLGSLNLRWQEVCKQLS
DRKKRLEEQKGPASQHELSTSVQGPWERAISPNKVPYYINHETQTTCWDHPKMTELYQSLADLNNVRESAYRTAM
KLRRLQKALCLDLLSLSAACDALDQHNLKQNDQPMDILQIINCLTTIYDRLEQEHNNLVNVPLCVDMCLNWLLNV
YDTGRTGRIRVLSFKTGIISLCKAHLEDKYRYLFKQVASSTGFCDQRRLGLLLHDSIQIPRQLGEVASFGGSNIE
PSVRSCFQFANNKPEIEAALFLDWMRLEPQSMVWLPVLHRVAAAETAKHQAKCNICKECPIIGFRYRSLKHENYD
ICQSCFFSGRVAKGHKMHYPMVEYCTPTTSGEDVRDFAKVLKNKFRTKRYFAKHPRMGYLPVQTVLEGDNMETPV
TLINFWPVDSAPASSPQLSHDDTHSRIEHYASRLAEMENSNGSYLNDSISPNESIDDEHLLIQHYCQSLNQDSPL
SQPRS
Utrophin N-terminus through R2_Dystrophin R16-R17_H4 to 1st
coiled coil and proline rich region that follows:
(SEQ ID NO: 95)
MAKYGEHEASPDNGQNEFSDIIKSRSDEHNDVQKKTFTKWINARFSKSGKPPINDMFTDLKDGRKLLDLLEGLTG
TSLPKERGSTRVHALNNVNRVLQVLHQNNVELVNIGGTDIVDGNHKLTLGLLWSIILHWQVKDVMKDVMSDLQQT
NSEKILLSWVRQTTRPYSQVNVLNFTTSWTDGLAFNAVLHRHKPDLFSWDKVVKMSPIERLEHAFSKAQTYLGIE
KLLDPEDVAVQLPDKKSIIMYLTSLFEVLPQQVTIDAIREVETLPRKYKKECEEEAINIQSTAPEEEHESPRAET
PSTVTEVDMDLDSYQIALEEVLTWLLSAEDTFQEQDDISDDVEEVKDQFATHEAFMMELTAHQSSVGSVLQAGNQ
LITQGTLSDEEEFEIQEQMTLLNARWEALRVESMDRQSRLHDVLMELQKKQLQQLSAWLTLTEERIQKMETCPLD
DDVKSLQKLLEEHKSLQSDLEAEQVKVNSLTHMVVIVDENSGESATAILEDQLQKLGERWTAVCRWTEERWNRLQ
EIAASAMMVMTEDMPLEISYVPSTYLTEITHVSQALLEVEQLLNAPDLCAKDFEDLFKQEESLKNIKDSLQQSSG
RIDIIHSKKTAALQSATPVERVKLQEALSQLDFQWEKVNKMYKDRQGRFDRSVEKWRRFHYDIKIFNQWLTEAEQ
FLRKTQIPENWEHAKYKWYLKELQDGIGQRQTVVRILNATGEEIIQQSSKTDASILQEKLGSLNLRWQEVCKQLS
DRKKRLEEQKGPASQHELSTSVQGPWERAISPNKVPYYINHETQTTCWDHPKMTELYQSLADLNNVRFSAYRTAM
KLRRLQKALCLDLLSLSAACDALDQHNLKQNDQPMDILQIINCLTTIYDRLEQEHNNLVNVPLCVDMCLNWLLNV
YDTGRTGRIRVLSFKTGIISLCKAHLEDKYRYLFKQVASSTGFCDQRRLGLLLHDSIQIPRQLGEVASFGGSNIE
PSVRSCFQFANNKPEIEAALFLDWMRLEPQSMVWLPVLHRVAAAETAKHQAKCNICKECPIIGFRYRSLKHENYD
ICQSCFFSGRVAKGHKMHYPMVEYCTPTTSGEDVRDFAKVLKNKFRTKRYFAKHPRMGYLPVQTVLEGDNMETPV
TLINFWPVDSAPASSPQLSHDDTHSRIEHYASRLAEMENSNGSYLNDSISPNESIDDEHLLIQHYCQSLNQDSPL
SQPRSPAQILISLESEERGELERILADLEEENRNLQAEYDRLKQQHEHKGLSPLPSPPEMMPTSPQSP
Utrophin N-terminus through R1_Dystrophin R16-R17_R23 to end of
syntrophin region:
(SEQ ID NO: 96)
MAKYGEHEASPDNGQNEFSDIIKSRSDEHNDVQKKTFTKWINARFSKSGKPPINDMFTDLKDGRKLLDLLEGLTG
TSLPKERGSTRVHALNNVNRVLQVLHQNNVELVNIGGTDIVDGNHKLTLGLLWSIILHWQVKDVMKDVMSDLQQT
NSEKILLSWVRQTTRPYSQVNVLNFTTSWTDGLAFNAVLHRHKPDLFSWDKVVKMSPIERLEHAFSKAQTYLGIE
KLLDPEDVAVQLPDKKSIIMYLTSLFEVLPQQVTIDAIREVETLPRKYKKECEEEAINIQSTAPEEEHESPRAET
PSTVTEVDMDLDSYQIALEEVLTWLLSAEDTFQEQDDISDDVEEVKDQFATHEAFMMELTAHQSSVGSVLQAGNQ
LITQGTLSDEEEFEIQEQMTLLNARWEALRVESMDRQSRLHDVLMAASAMMVMTEDMPLEISYVPSTYLTEITHV
SQALLEVEQLLNAPDLCAKDFEDLFKQEESLKNIKDSLQQSSGRIDIIHSKKTAALQSATPVERVKLQEALSQLD
FQWEKVNKMYKDRQGRFDRSVEKWRRFHYDIKIFNQWLTEAEQFLRKTQIPENWEHAKYKWYLKELQDGIGQRQT
VVRTLNATGEEIIQQSSKTDASILQEKLGSLNLRWQEVCKQLSDRKKRLEEQKSSDQWKRLHLSLQELLVWLQLK
DDELSRQAPIGGDFPAVQKQNDVHRAFKRELKTKEPVIMSTLETVRIFLTEQPLEGLEKLYQEPRELPPEERAQN
VTRLLRKQAEEVNTEWEKLNLHSADWQRKIDETLERLQELQEATDELDLKLRQAEVIKGSWQPVGDLLIDSLQDH
LEKVKALRGEIAPLKENVSHVNDLARQLTTLGIQLSPYNLSTLEDLNTRWKLLQVAVEDRVRQLHEAHRDFGPAS
QHELSTSVQGPWERAISPNKVPYYINHETQTTCWDHPKMTELYQSLADLNNVRESAYRTAMKLRRLQKALCLDLL
SLSAACDALDQHNLKQNDQPMDILQIINCLTTIYDRLEQEHNNLVNVPLCVDMCLNWLLNVYDTGRIGRIRVLSF
KTGIISLCKAHLEDKYRYLFKQVASSTGFCDQRRLGLLLHDSIQIPRQLGEVASEGGSNIEPSVRSCFQFANNKP
EIEAALFLDWMRLEPQSMVWLPVLHRVAAAETAKHQAKCNICKECPIIGFRYRSLKHFNYDICQSCFFSGRVAKG
HKMHYPMVEYCTPTTSGEDVRDFAKVLKNKFRTKRYFAKHPRMGYLPVQTVLEGDNMETPVTLINFWPVDSAPAS
SPQLSHDDTHSRIEHYASRLAEMENSNGSYLNDSISPNESIDDEHLLIQHYCQSLNQDSPLSQPRS
Utrophin N-terminus through R2_Dystrophin R16-R17_R24+H4 to end of
syntrophin region:
(SEQ ID NO: 97)
MAKYGEHEASPDNGQNEFSDIIKSRSDEHNDVQKKTFTKWINARFSKSGKPPINDMFTDLKDGRKLLDLLEGLTG
TSLPKERGSTRVHALNNVNRVLQVLHQNNVELVNIGGTDIVDGNHKLTLGLLWSIILHWQVKDVMKDVMSDLQQT
NSEKILLSWVRQTTRPYSQVNVLNFTTSWTDGLAFNAVLHRHKPDLFSWDKVVKMSPIERLEHAFSKAQTYLGIE
KLLDPEDVAVQLPDKKSIIMYLTSLFEVLPQQVTIDAIREVETLPRKYKKECEEEAINIQSTAPEEEHESPRAET
PSTVTEVDMDLDSYQIALEEVLTWLLSAEDTFQEQDDISDDVEEVKDQFATHEAFMMELTAHQSSVGSVLQAGNQ
LITQGTLSDEEEFEIQEQMTLLNARWEALRVESMDRQSRLHDVLMELQKKQLQQLSAWLTLTEERIQKMETCPLD
DDVKSLQKLLEEHKSLQSDLEAEQVKVNSLTHMVVIVDENSGESATAILEDQLQKLGERWTAVCRWTEERWNRLQ
EIAASAMMVMTEDMPLEISYVPSTYLTEITHVSQALLEVEQLLNAPDLCAKDFEDLFKQEESLKNIKDSLQQSSG
RIDIIHSKKTAALQSATPVERVKLQEALSQLDFQWEKVNKMYKDRQGRFDRSVEKWRRFHYDIKIFNQWLTEAEQ
FLRKTQIPENWEHAKYKWYLKELQDGIGQRQTVVRTLNATGEEIIQQSSKTDASILQEKLGSLNLRWQEVCKQLS
DRKKRLEEQKWQRKIDETLERLQELQEATDELDLKLRQAEVIKGSWQPVGDLLIDSLQDHLEKVKALRGEIAPLK
ENVSHVNDLARQLTTLGIQLSPYNLSTLEDLNTRWKLLQVAVEDRVRQLHEAHRDFGPASQHELSTSVQGPWERA
ISPNKVPYYINHETQTTCWDHPKMTELYQSLADLNNVRESAYRTAMKLRRLQKALCLDLLSLSAACDALDQHNLK
QNDQPMDILQIINCLTTIYDRLEQEHNNLVNVPLCVDMCLNWLLNVYDTGRIGRIRVLSFKTGIISLCKAHLEDK
YRYLFKQVASSTGFCDQRRLGLLLHDSIQIPRQLGEVASFGGSNIEPSVRSCFQFANNKPEIEAALFLDWMRLEP
QSMVWLPVLHRVAAAETAKHQAKCNICKECPIIGFRYRSLKHFNYDICQSCFFSGRVAKGHKMHYPMVEYCTPTT
SGEDVRDFAKVLKNKFRTKRYFAKHPRMGYLPVQTVLEGDNMETPVTLINFWPVDSAPASSPQLSHDDTHSRIEH
YASRLAEMENSNGSYLNDSISPNESIDDEHLLIQHYCQSLNQDSPLSQPRS
Utrophin N-terminus through R2_Dystrophin R23+R24+H4 to end of
syntrophin region:
(SEQ ID NO: 98)
MAKYGEHEASPDNGQNEFSDIIKSRSDEHNDVQKKTFTKWINARFSKSGKPPINDMFTDLKDGRKLLDLLEGLTG
TSLPKERGSTRVHALNNVNRVLQVLHQNNVELVNIGGTDIVDGNHKLTLGLLWSIILHWQVKDVMKDVMSDLQQT
NSEKILLSWVRQTTRPYSQVNVLNFTTSWTDGLAFNAVLHRHKPDLFSWDKVVKMSPIERLEHAFSKAQTYLGIE
KLLDPEDVAVQLPDKKSIIMYLTSLFEVLPQQVTIDAIREVETLPRKYKKECEEEAINIQSTAPEEEHESPRAET
PSTVTEVDMDLDSYQIALEEVLTWLLSAEDTFQEQDDISDDVEEVKDQFATHEAFMMELTAHQSSVGSVLQAGNQ
LITQGTLSDEEEFEIQEQMTLLNARWEALRVESMDRQSRLHDVLMELQKKQLQQLSAWLTLTEERIQKMETCPLD
DDVKSLQKLLEEHKSLQSDLEAEQVKVNSLTHMVVIVDENSGESATAILEDQLQKLGERWTAVCRWTEERWNRLQ
EIAASALQLKDDELSRQAPIGGDFPAVQKQNDVHRAFKRELKTKEPVIMSTLETVRIFLTEQPLEGLEKLYQEPR
ELPPEERAQNVTRLLRKQAEEVNTEWEKLNLHSADWQRKIDETLERLQELQEATDELDLKLRQAEVIKGSWQPVG
DLLIDSLQDHLEKVKALRGEIAPLKENVSHVNDLARQLTTLGIQLSPYNLSTLEDLNTRWKLLQVAVEDRVRQLH
EAHRDFGPASQHELSTSVQGPWERAISPNKVPYYINHETQTTCWDHPKMTELYQSLADLNNVRESAYRTAMKLRR
LQKALCLDLLSLSAACDALDQHNLKQNDQPMDILQIINCLTTIYDRLEQEHNNLVNVPLCVDMCLNWLLNVYDTG
RTGRIRVLSFKTGIISLCKAHLEDKYRYLFKQVASSTGFCDQRRLGLLLHDSIQIPRQLGEVASEGGSNIEPSVR
SCFQFANNKPEIEAALFLDWMRLEPQSMVWLPVLHRVAAAETAKHQAKCNICKECPIIGFRYRSLKHENYDICQS
CFFSGRVAKGHKMHYPMVEYCTPTTSGEDVRDFAKVLKNKFRTKRYFAKHPRMGYLPVQTVLEGDNMETPVTLIN
FWPVDSAPASSPQLSHDDTHSRIEHYASRLAEMENSNGSYLNDSISPNESIDDEHLLIQHYCQSLNQDSPLSQPR
S
Utrophin N-terminus through R2_Dystrophin R23 to end of 1st
Coiled Coil:
(SEQ ID NO: 99)
MAKYGEHEASPDNGQNEFSDIIKSRSDEHNDVQKKTFTKWINARFSKSGKPPINDMFTDLKDGRKLLDLLEGLTG
TSLPKERGSTRVHALNNVNRVLQVLHQNNVELVNIGGTDIVDGNHKLTLGLLWSIILHWQVKDVMKDVMSDLQQT
NSEKILLSWVRQTTRPYSQVNVLNFTTSWTDGLAFNAVLHRHKPDLFSWDKVVKMSPIERLEHAFSKAQTYLGIE
KLLDPEDVAVQLPDKKSIIMYLTSLFEVLPQQVTIDAIREVETLPRKYKKECEEEAINIQSTAPEEEHESPRAET
PSTVTEVDMDLDSYQIALEEVLTWLLSAEDTFQEQDDISDDVEEVKDQFATHEAFMMELTAHQSSVGSVLQAGNQ
LITQGTLSDEEEFEIQEQMTLLNARWEALRVESMDRQSRLHDVLMELQKKQLQQLSAWLTLTEERIQKMETCPLD
DDVKSLQKLLEEHKSLQSDLEAEQVKVNSLTHMVVIVDENSGESATAILEDQLQKLGERWTAVCRWTEERWNRLQ
EIAASASSDQWKRLHLSLQELLVWLQLKDDELSRQAPIGGDFPAVQKQNDVHRAFKRELKTKEPVIMSTLETVRI
FLTEQPLEGLEKLYQEPRELPPEERAQNVTRLLRKQAEEVNTEWEKLNLHSADWQRKIDETLERLQELQEATDEL
DLKLRQAEVIKGSWQPVGDLLIDSLQDHLEKVKALRGEIAPLKENVSHVNDLARQLTTLGIQLSPYNLSTLEDLN
TRWKLLQVAVEDRVRQLHEAHRDFGPASQHELSTSVQGPWERAISPNKVPYYINHETQTTCWDHPKMTELYQSLA
DLNNVRFSAYRTAMKLRRLQKALCLDLLSLSAACDALDQHNLKQNDQPMDILQIINCLTTIYDRLEQEHNNLVNV
PLCVDMCLNWLLNVYDTGRIGRIRVLSFKTGIISLCKAHLEDKYRYLFKQVASSTGFCDQRRLGLLLHDSIQIPR
QLGEVASFGGSNIEPSVRSCFQFANNKPEIEAALFLDWMRLEPQSMVWLPVLHRVAAAETAKHQAKCNICKECPI
IGFRYRSLKHFNYDICQSCFFSGRVAKGHKMHYPMVEYCTPTTSGEDVRDFAKVLKNKFRTKRYFAKHPRMGYLP
VQTVLEGDNMETPVTLINFWPVDSAPASSPQLSHDDTHSRIEHYASRLAEMENSNGSYLNDSISPNESIDDEHLL
IQHYCQSLNQDSPLSQPRSPAQILISLESEERGELERILADLEEENRNLQAEYDRLKQQHEHKGLSPLPSPPEMM
PTSPQSP
Utrophin N-terminus through R3_Dystrophin R23+R24+H4 to end of
syntrophin region:
(SEQ ID NO: 100)
MAKYGEHEASPDNGQNEFSDIIKSRSDEHNDVQKKTFTKWINARFSKSGKPPINDMFTDLKDGRKLLDLLEGLTG
TSLPKERGSTRVHALNNVNRVLQVLHQNNVELVNIGGTDIVDGNHKLTLGLLWSIILHWQVKDVMKDVMSDLQQT
NSEKILLSWVRQTTRPYSQVNVLNFTTSWTDGLAFNAVLHRHKPDLFSWDKVVKMSPIERLEHAFSKAQTYLGIE
KLLDPEDVAVQLPDKKSIIMYLTSLFEVLPQQVTIDAIREVETLPRKYKKECEEEAINIQSTAPEEEHESPRAET
PSTVTEVDMDLDSYQIALEEVLTWLLSAEDTFQEQDDISDDVEEVKDQFATHEAFMMELTAHQSSVGSVLQAGNQ
LITQGTLSDEEEFEIQEQMTLLNARWEALRVESMDRQSRLHDVLMELQKKQLQQLSAWLTLTEERIQKMETCPLD
DDVKSLQKLLEEHKSLQSDLEAEQVKVNSLTHMVVIVDENSGESATAILEDQLQKLGERWTAVCRWTEERWNRLQ
EINILWQELLEEQCLLKAWLTEKEEALNKVQTSNFKDQKELSVSVRRLAILKEDMEMKRQTLDQLSEIGQDVGQL
LDNSKASKKINSDSEELTQRWDSLVQRLEDSSNQVTQAAASASSDQWKRLHLSLQELLVWLQLKDDELSRQAPIG
GDFPAVQKQNDVHRAFKRELKTKEPVIMSTLETVRIFLTEQPLEGLEKLYQEPRELPPEERAQNVTRLLRKQAEE
VNTEWEKLNLHSADWQRKIDETLERLQELQEATDELDLKLRQAEVIKGSWQPVGDLLIDSLQDHLEKVKALRGEI
APLKENVSHVNDLARQLTTLGIQLSPYNLSTLEDLNTRWKLLQVAVEDRVRQLHEAHRDFGPASQHELSTSVQGP
WERAISPNKVPYYINHETQTTCWDHPKMTELYQSLADLNNVRESAYRTAMKLRRLQKALCLDLLSLSAACDALDQ
HNLKQNDQPMDILQIINCLTTIYDRLEQEHNNLVNVPLCVDMCLNWLLNVYDTGRIGRIRVLSFKTGIISLCKAH
LEDKYRYLFKQVASSTGFCDQRRLGLLLHDSIQIPRQLGEVASFGGSNIEPSVRSCFQFANNKPEIEAALFLDWM
RLEPQSMVWLPVLHRVAAAETAKHQAKCNICKECPIIGFRYRSLKHFNYDICQSCFFSGRVAKGHKMHYPMVEYC
TPTTSGEDVRDFAKVLKNKFRTKRYFAKHPRMGYLPVQTVLEGDNMETPVTLINFWPVDSAPASSPQLSHDDTHS
RIEHYASRLAEMENSNGSYLNDSISPNESIDDEHLLIQHYCQSLNQDSPLSQPRS
Utrophin N-terminus through R2_Dystrophin R23 to end:
(SEQ ID NO: 101)
MAKYGEHEASPDNGQNEFSDIIKSRSDEHNDVQKKTFTKWINARFSKSGKPPINDMFTDLKDGRKLLDLLEGLTG
TSLPKERGSTRVHALNNVNRVLQVLHQNNVELVNIGGTDIVDGNHKLTLGLLWSIILHWQVKDVMKDVMSDLQQT
NSEKILLSWVRQTTRPYSQVNVLNFTTSWTDGLAFNAVLHRHKPDLFSWDKVVKMSPIERLEHAFSKAQTYLGIE
KLLDPEDVAVQLPDKKSIIMYLTSLFEVLPQQVTIDAIREVETLPRKYKKECEEEAINIQSTAPEEEHESPRAET
PSTVTEVDMDLDSYQIALEEVLTWLLSAEDTFQEQDDISDDVEEVKDQFATHEAFMMELTAHQSSVGSVLQAGNQ
LITQGTLSDEEEFEIQEQMTLLNARWEALRVESMDRQSRLHDVLMELQKKQLQQLSAWLTLTEERIQKMETCPLD
DDVKSLQKLLEEHKSLQSDLEAEQVKVNSLTHMVVIVDENSGESATAILEDQLQKLGERWTAVCRWTEERWNRLQ
EIAASASSDQWKRLHLSLQELLVWLQLKDDELSRQAPIGGDFPAVQKQNDVHRAFKRELKTKEPVIMSTLETVRI
FLTEQPLEGLEKLYQEPRELPPEERAQNVTRLLRKQAEEVNTEWEKLNLHSADWQRKIDETLERLQELQEATDEL
DLKLRQAEVIKGSWQPVGDLLIDSLQDHLEKVKALRGEIAPLKENVSHVNDLARQLTTLGIQLSPYNLSTLEDLN
TRWKLLQVAVEDRVRQLHEAHRDFGPASQHFLSTSVQGPWERAISPNKVPYYINHETQTTCWDHPKMTELYQSLA
DLNNVRFSAYRTAMKLRRLQKALCLDLLSLSAACDALDQHNLKQNDQPMDILQIINCLTTIYDRLEQEHNNLVNV
PLCVDMCLNWLLNVYDTGRTGRIRVLSFKTGIISLCKAHLEDKYRYLFKQVASSTGFCDQRRLGLLLHDSIQIPR
QLGEVASFGGSNIEPSVRSCFQFANNKPEIEAALFLDWMRLEPQSMVWLPVLHRVAAAETAKHQAKCNICKECPI
IGFRYRSLKHFNYDICQSCFFSGRVAKGHKMHYPMVEYCTPTTSGEDVRDFAKVLKNKFRTKRYFAKHPRMGYLP
VQTVLEGDNMETPVTLINFWPVDSAPASSPQLSHDDTHSRIEHYASRLAEMENSNGSYLNDSISPNESIDDEHLL
IQHYCQSLNQDSPLSQPRSPAQILISLESEERGELERILADLEEENRNLQAEYDRLKQQHEHKGLSPLPSPPEMM
PTSPQSPRDAELIAEAKLLRQHKGRLEARMQILEDHNKQLESQLHRLRQLLEQPQAEAKVNGTTVSSPSTSLQRS
DSSQPMLLRVVGSQTSDSMGEEDLLSPPQDTSTGLEEVMEQLNNSFPSSRGRNTPGKPMREDTM
Utrophin N-terminus through R3; Dystrophin R24 to end:
(SEQ ID NO: 149)
MAKYGEHEASPDNGQNEFSDIIKSRSDEHNDVQKKTFTKWINARFSKSGKPPINDMFTDLKDGRKLLDLLEGLTG
TSLPKERGSTRVHALNNVNRVLQVLHQNNVELVNIGGTDIVDGNHKLTLGLLWSIILHWQVKDVMKDVMSDLQQT
NSEKILLSWVRQTTRPYSQVNVLNFTTSWTDGLAFNAVLHRHKPDLFSWDKVVKMSPIERLEHAFSKAQTYLGIE
KLLDPEDVAVQLPDKKSIIMYLTSLFEVLPQQVTIDAIREVETLPRKYKKECEEEAINIQSTAPEEEHESPRAET
PSTVTEVDMDLDSYQIALEEVLTWLLSAEDTFQEQDDISDDVEEVKDQFATHEAFMMELTAHQSSVGSVLQAGNQ
LITQGTLSDEEEFEIQEQMTLLNARWEALRVESMDRQSRLHDVLMELQKKQLQQLSAWLTLTEERIQKMETCPLD
DDVKSLQKLLEEHKSLQSDLEAEQVKVNSLTHMVVIVDENSGESATAILEDQLQKLGERWTAVCRWTEERWNRLQ
EINILWQELLEEQCLLKAWLTEKEEALNKVQTSNFKDQKELSVSVRRLAILKEDMEMKRQTLDQLSEIGQDVGQL
LDNSKASKKINSDSEELTQRWDSLVQRLEDSSNQVTQAAASAQRKIDETLERLQELQEATDELDLKLRQAEVIKG
SWQPVGDLLIDSLQDHLEKVKALRGEIAPLKENVSHVNDLARQLTTLGIQLSPYNLSTLEDLNTRWKLLQVAVED
RVRQLHEAHRDFGPASQHELSTSVQGPWERAISPNKVPYYINHETQTTCWDHPKMTELYQSLADLNNVRFSAYRT
AMKLRRLQKALCLDLLSLSAACDALDQHNLKQNDQPMDILQIINCLTTIYDRLEQEHNNLVNVPLCVDMCLNWLL
NVYDTGRTGRIRVLSFKTGIISLCKAHLEDKYRYLFKQVASSTGFCDQRRLGLLLHDSIQIPRQLGEVASEGGSN
IEPSVRSCFQFANNKPEIEAALFLDWMRLEPQSMVWLPVLHRVAAAETAKHQAKCNICKECPIIGFRYRSLKHEN
YDICQSCFFSGRVAKGHKMHYPMVEYCTPTTSGEDVRDFAKVLKNKFRTKRYFAKHPRMGYLPVQTVLEGDNMET
PVTLINFWPVDSAPASSPQLSHDDTHSRIEHYASRLAEMENSNGSYLNDSISPNESIDDEHLLIQHYCQSLNQDS
PLSQPRSPAQILISLESEERGELERILADLEEENRNLQAEYDRLKQQHEHKGLSPLPSPPEMMPTSPQSPRDAEL
IAEAKLLRQHKGRLEARMQILEDHNKQLESQLHRLRQLLEQPQAEAKVNGTTVSSPSTSLQRSDSSQPMLLRVVG
SQTSDSMGEEDLLSPPQDTSTGLEEVMEQLNNSFPSSRGRNTPGKPMREDTM
Utrophin N-terminus through R3; Dystrophin R24 to end of
Syntrophin binding sites:
(SEQ ID NO: 150)
MAKYGEHEASPDNGQNEFSDIIKSRSDEHNDVQKKTFTKWINARFSKSGKPPINDMFTDLKDGRKLLDLLEGLTG
TSLPKERGSTRVHALNNVNRVLQVLHQNNVELVNIGGTDIVDGNHKLTLGLLWSIILHWQVKDVMKDVMSDLQQT
NSEKILLSWVRQTTRPYSQVNVLNFTTSWTDGLAFNAVLHRHKPDLFSWDKVVKMSPIERLEHAFSKAQTYLGIE
KLLDPEDVAVQLPDKKSIIMYLTSLFEVLPQQVTIDAIREVETLPRKYKKECEEEAINIQSTAPEEEHESPRAET
PSTVTEVDMDLDSYQIALEEVLTWLLSAEDTFQEQDDISDDVEEVKDQFATHEAFMMELTAHQSSVGSVLQAGNQ
LITQGTLSDEEEFEIQEQMTLLNARWEALRVESMDRQSRLHDVLMELQKKQLQQLSAWLTLTEERIQKMETCPLD
DDVKSLQKLLEEHKSLQSDLEAEQVKVNSLTHMVVIVDENSGESATAILEDQLQKLGERWTAVCRWTEERWNRLQ
EINILWQELLEEQCLLKAWLTEKEEALNKVQTSNFKDQKELSVSVRRLAILKEDMEMKRQTLDQLSEIGQDVGQL
LDNSKASKKINSDSEELTQRWDSLVQRLEDSSNQVTQAAASAQRKIDETLERLQELQEATDELDLKLRQAEVIKG
SWQPVGDLLIDSLQDHLEKVKALRGEIAPLKENVSHVNDLARQLTTLGIQLSPYNLSTLEDLNTRWKLLQVAVED
RVRQLHEAHRDFGPASQHELSTSVQGPWERAISPNKVPYYINHETQTTCWDHPKMTELYQSLADLNNVRESAYRT
AMKLRRLQKALCLDLLSLSAACDALDQHNLKQNDQPMDILQIINCLTTIYDRLEQEHNNLVNVPLCVDMCLNWLL
NVYDTGRIGRIRVLSFKTGIISLCKAHLEDKYRYLFKQVASSTGFCDQRRLGLLLHDSIQIPRQLGEVASFGGSN
IEPSVRSCFQFANNKPEIEAALFLDWMRLEPQSMVWLPVLHRVAAAETAKHQAKCNICKECPIIGFRYRSLKHEN
YDICQSCFFSGRVAKGHKMHYPMVEYCTPTTSGEDVRDFAKVLKNKFRTKRYFAKHPRMGYLPVQTVLEGDNMET
PVTLINFWPVDSAPASSPQLSHDDTHSRIEHYASRLAEMENSNGSYLNDSISPNESIDDEHLLIQHYCQSLNQDS
PLSQPRS
Utrophin N-terminus through R3; Dystrophin R24 to end of 1st coiled
coil and proline- rich region:
(SEQ ID NO: 151)
MAKYGEHEASPDNGQNEFSDIIKSRSDEHNDVQKKTFTKWINARFSKSGKPPINDMFTDLKDGRKLLDLLEGLTG
TSLPKERGSTRVHALNNVNRVLQVLHQNNVELVNIGGTDIVDGNHKLTLGLLWSIILHWQVKDVMKDVMSDLQQT
NSEKILLSWVRQTTRPYSQVNVLNFTTSWTDGLAFNAVLHRHKPDLFSWDKVVKMSPIERLEHAFSKAQTYLGIE
KLLDPEDVAVQLPDKKSIIMYLTSLFEVLPQQVTIDAIREVETLPRKYKKECEEEAINIQSTAPEEEHESPRAET
PSTVTEVDMDLDSYQIALEEVLTWLLSAEDTFQEQDDISDDVEEVKDQFATHEAFMMELTAHQSSVGSVLQAGNQ
LITQGTLSDEEEFEIQEQMTLLNARWEALRVESMDRQSRLHDVLMELQKKQLQQLSAWLTLTEERIQKMETCPLD
DDVKSLQKLLEEHKSLQSDLEAEQVKVNSLTHMVVIVDENSGESATAILEDQLQKLGERWTAVCRWTEERWNRLQ
EINILWQELLEEQCLLKAWLTEKEEALNKVQTSNFKDQKELSVSVRRLAILKEDMEMKRQTLDQLSEIGQDVGQL
LDNSKASKKINSDSEELTQRWDSLVQRLEDSSNQVTQAAASAQRKIDETLERLQELQEATDELDLKLRQAEVIKG
SWQPVGDLLIDSLQDHLEKVKALRGEIAPLKENVSHVNDLARQLTTLGIQLSPYNLSTLEDLNTRWKLLQVAVED
RVRQLHEAHRDFGPASQHELSTSVQGPWERAISPNKVPYYINHETQTTCWDHPKMTELYQSLADLNNVRFSAYRT
AMKLRRLQKALCLDLLSLSAACDALDQHNLKQNDQPMDILQIINCLTTIYDRLEQEHNNLVNVPLCVDMCLNWLL
NVYDTGRTGRIRVLSFKTGIISLCKAHLEDKYRYLFKQVASSTGFCDQRRLGLLLHDSIQIPRQLGEVASFGGSN
IEPSVRSCFQFANNKPEIEAALFLDWMRLEPQSMVWLPVLHRVAAAETAKHQAKCNICKECPIIGFRYRSLKHEN
YDICQSCFFSGRVAKGHKMHYPMVEYCTPTTSGEDVRDFAKVLKNKFRTKRYFAKHPRMGYLPVQTVLEGDNMET
PVTLINFWPVDSAPASSPQLSHDDTHSRIEHYASRLAEMENSNGSYLNDSISPNESIDDEHLLIQHYCQSLNQDS
PLSQPRSPAQILISLESEERGELERILADLEEENRNLQAEYDRLKQQHEHKGLSPLPSPPEMMPTSPQSP
Utrophin Nterm-H2_Dystrophin R24+H4 to end of syntrophin region:
(SEQ ID NO: 152)
MAKYGEHEASPDNGQNEFSDIIKSRSDEHNDVQKKTFTKWINARFSKSGKPPINDMFTDLKDGRKLLDLLEGLTG
TSLPKERGSTRVHALNNVNRVLQVLHQNNVELVNIGGTDIVDGNHKLTLGLLWSIILHWQVKDVMKDVMSDLQQT
NSEKILLSWVRQTTRPYSQVNVLNFTTSWTDGLAFNAVLHRHKPDLFSWDKVVKMSPIERLEHAFSKAQTYLGIE
KLLDPEDVAVQLPDKKSIIMYLTSLFEVLPQQVTIDAIREVETLPRKYKKECEEEAINIQSTAPEEEHESPRAET
PSTVTEVDMDLDSYQIALEEVLTWLLSAEDTFQEQDDISDDVEEVKDQFATHEAFMMELTAHQSSVGSVLQAGNQ
LITQGTLSDEEEFEIQEQMTLLNARWEALRVESMDRQSRLHDVLMELQKKQLQQLSAWLTLTEERIQKMETCPLD
DDVKSLQKLLEEHKSLQSDLEAEQVKVNSLTHMVVIVDENSGESATAILEDQLQKLGERWTAVCRWTEERWNRLQ
EINILWQELLEEQCLLKAWLTEKEEALNKVQTSNFKDQKELSVSVRRLAILKEDMEMKRQTLDQLSEIGQDVGQL
LDNSKASKKINSDSEELTQRWDSLVQRLEDSSNQVTQAVAKLGMSQIPQKDLLETVRVREQAITKKSKQEAASAQ
RKIDETLERLQELQEATDELDLKLRQAEVIKGSWQPVGDLLIDSLQDHLEKVKALRGEIAPLKENVSHVNDLARQ
LTTLGIQLSPYNLSTLEDLNTRWKLLQVAVEDRVRQLHEAHRDFGPASQHELSTSVQGPWERAISPNKVPYYINH
ETQTTCWDHPKMTELYQSLADLNNVRFSAYRTAMKLRRLQKALCLDLLSLSAACDALDQHNLKQNDQPMDILQII
NCLTTIYDRLEQEHNNLVNVPLCVDMCLNWLLNVYDTGRTGRIRVLSFKTGIISLCKAHLEDKYRYLFKQVASST
GFCDQRRLGLLLHDSIQIPRQLGEVASFGGSNIEPSVRSCFQFANNKPEIEAALFLDWMRLEPQSMVWLPVLHRV
AAAETAKHQAKCNICKECPIIGFRYRSLKHFNYDICQSCFFSGRVAKGHKMHYPMVEYCTPTTSGEDVRDFAKVL
KNKFRTKRYFAKHPRMGYLPVQTVLEGDNMETPVTLINFWPVDSAPASSPQLSHDDTHSRIEHYASRLAEMENSN
GSYLNDSISPNESIDDEHLLIQHYCQSLNQDSPLSQPRS
Utrophin N-terminus through H2; Dystrophin R24 to end:
(SEQ ID NO: 153)
MAKYGEHEASPDNGQNEFSDIIKSRSDEHNDVQKKTFTKWINARFSKSGKPPINDMFTDLKDGRKLLDLLEGLTG
TSLPKERGSTRVHALNNVNRVLQVLHQNNVELVNIGGTDIVDGNHKLTLGLLWSIILHWQVKDVMKDVMSDLQQT
NSEKILLSWVRQTTRPYSQVNVLNFTTSWTDGLAFNAVLHRHKPDLFSWDKVVKMSPIERLEHAFSKAQTYLGIE
KLLDPEDVAVQLPDKKSIIMYLTSLFEVLPQQVTIDAIREVETLPRKYKKECEEEAINIQSTAPEEEHESPRAET
PSTVTEVDMDLDSYQIALEEVLTWLLSAEDTFQEQDDISDDVEEVKDQFATHEAFMMELTAHQSSVGSVLQAGNQ
LITQGTLSDEEEFEIQEQMTLLNARWEALRVESMDRQSRLHDVLMELQKKQLQQLSAWLTLTEERIQKMETCPLD
DDVKSLQKLLEEHKSLQSDLEAEQVKVNSLTHMVVIVDENSGESATAILEDQLQKLGERWTAVCRWTEERWNRLQ
EINILWQELLEEQCLLKAWLTEKEEALNKVQTSNFKDQKELSVSVRRLAILKEDMEMKRQTLDQLSEIGQDVGQL
LDNSKASKKINSDSEELTQRWDSLVQRLEDSSNQVTQAVAKLGMSQIPQKDLLETVRVREQAITKKSKQEAASAQ
RKIDETLERLQELQEATDELDLKLRQAEVIKGSWQPVGDLLIDSLQDHLEKVKALRGEIAPLKENVSHVNDLARQ
LTTLGIQLSPYNLSTLEDLNTRWKLLQVAVEDRVRQLHEAHRDFGPASQHELSTSVQGPWERAISPNKVPYYINH
ETQTTCWDHPKMTELYQSLADLNNVRFSAYRTAMKLRRLQKALCLDLLSLSAACDALDQHNLKQNDQPMDILQII
NCLTTIYDRLEQEHNNLVNVPLCVDMCLNWLLNVYDTGRTGRIRVLSFKTGIISLCKAHLEDKYRYLFKQVASST
GFCDQRRLGLLLHDSIQIPRQLGEVASFGGSNIEPSVRSCFQFANNKPEIEAALFLDWMRLEPQSMVWLPVLHRV
AAAETAKHQAKCNICKECPIIGFRYRSLKHFNYDICQSCFFSGRVAKGHKMHYPMVEYCTPTTSGEDVRDFAKVL
KNKFRTKRYFAKHPRMGYLPVQTVLEGDNMETPVTLINFWPVDSAPASSPQLSHDDTHSRIEHYASRLAEMENSN
GSYLNDSISPNESIDDEHLLIQHYCQSLNQDSPLSQPRSPAQILISLESEERGELERILADLEEENRNLQAEYDR
LKQQHEHKGLSPLPSPPEMMPTSPQSPRDAELIAEAKLLRQHKGRLEARMQILEDHNKQLESQLHRLRQLLEQPQ
AEAKVNGTTVSSPSTSLQRSDSSQPMLLRVVGSQTSDSMGEEDLLSPPQDTSTGLEEVMEQLNNSFPSSRGRNTP
GKPMREDTM
Utrophin N-terminus through R3; Dystrophin R23 to end:
(SEQ ID NO: 154)
MAKYGEHEASPDNGQNEFSDIIKSRSDEHNDVQKKTFTKWINARFSKSGKPPINDMFTDLKDGRKLLDLLEGLTG
TSLPKERGSTRVHALNNVNRVLQVLHQNNVELVNIGGTDIVDGNHKLTLGLLWSIILHWQVKDVMKDVMSDLQQT
NSEKILLSWVRQTTRPYSQVNVLNFTTSWTDGLAFNAVLHRHKPDLFSWDKVVKMSPIERLEHAFSKAQTYLGIE
KLLDPEDVAVQLPDKKSIIMYLTSLFEVLPQQVTIDAIREVETLPRKYKKECEEEAINIQSTAPEEEHESPRAET
PSTVTEVDMDLDSYQIALEEVLTWLLSAEDTFQEQDDISDDVEEVKDQFATHEAFMMELTAHQSSVGSVLQAGNQ
LITQGTLSDEEEFEIQEQMTLLNARWEALRVESMDRQSRLHDVLMELQKKQLQQLSAWLTLTEERIQKMETCPLD
DDVKSLQKLLEEHKSLQSDLEAEQVKVNSLTHMVVIVDENSGESATAILEDQLQKLGERWTAVCRWTEERWNRLQ
EINILWQELLEEQCLLKAWLTEKEEALNKVQTSNFKDQKELSVSVRRLAILKEDMEMKRQTLDQLSEIGQDVGQL
LDNSKASKKINSDSEELTQRWDSLVQRLEDSSNQVTQAAASASSDQWKRLHLSLQELLVWLQLKDDELSRQAPIG
GDFPAVQKQNDVHRAFKRELKTKEPVIMSTLETVRIFLTEQPLEGLEKLYQEPRELPPEERAQNVTRLLRKQAEE
VNTEWEKLNLHSADQRKIDETLERLQELQEATDELDLKLRQAEVIKGSWQPVGDLLIDSLQDHLEKVKALRGEIA
PLKENVSHVNDLARQLTTLGIQLSPYNLSTLEDLNTRWKLLQVAVEDRVRQLHEAHRDFGPASQHELSTSVQGPW
ERAISPNKVPYYINHETQTTCWDHPKMTELYQSLADLNNVRESAYRTAMKLRRLQKALCLDLLSLSAACDALDQH
NLKQNDQPMDILQIINCLTTIYDRLEQEHNNLVNVPLCVDMCLNWLLNVYDTGRTGRIRVLSFKTGIISLCKAHL
EDKYRYLFKQVASSTGFCDQRRLGLLLHDSIQIPRQLGEVASFGGSNIEPSVRSCFQFANNKPEIEAALFLDWMR
LEPQSMVWLPVLHRVAAAETAKHQAKCNICKECPIIGFRYRSLKHFNYDICQSCFFSGRVAKGHKMHYPMVEYCT
PTTSGEDVRDFAKVLKNKFRTKRYFAKHPRMGYLPVQTVLEGDNMETPVTLINFWPVDSAPASSPQLSHDDTHSR
IEHYASRLAEMENSNGSYLNDSISPNESIDDEHLLIQHYCQSLNQDSPLSQPRSPAQILISLESEERGELERILA
DLEEENRNLQAEYDRLKQQHEHKGLSPLPSPPEMMPTSPQSPRDAELIAEAKLLRQHKGRLEARMQILEDHNKQL
ESQLHRLRQLLEQPQAEAKVNGTTVSSPSTSLQRSDSSQPMLLRVVGSQTSDSMGEEDLLSPPQDTSTGLEEVME
QLNNSFPSSRGRNTPGKPMREDTM
Utrophin Nterm-R3_Dystrophin R23+H4 to to 1st coiled coil and
proline rich region that follows:
(SEQ ID NO: 155)
MAKYGEHEASPDNGQNEFSDIIKSRSDEHNDVQKKTFTKWINARFSKSGKPPINDMFTDLKDGRKLLDLLEGLTG
TSLPKERGSTRVHALNNVNRVLQVLHQNNVELVNIGGTDIVDGNHKLTLGLLWSIILHWQVKDVMKDVMSDLQQT
NSEKILLSWVRQTTRPYSQVNVLNFTTSWTDGLAFNAVLHRHKPDLFSWDKVVKMSPIERLEHAFSKAQTYLGIE
KLLDPEDVAVQLPDKKSIIMYLTSLFEVLPQQVTIDAIREVETLPRKYKKECEEEAINIQSTAPEEEHESPRAET
PSTVTEVDMDLDSYQIALEEVLTWLLSAEDTFQEQDDISDDVEEVKDQFATHEAFMMELTAHQSSVGSVLQAGNQ
LITQGTLSDEEEFEIQEQMILLNARWEALRVESMDRQSRLHDVLMELQKKQLQQLSAWLTLTEERIQKMETCPLD
DDVKSLQKLLEEHKSLQSDLEAEQVKVNSLTHMVVIVDENSGESATAILEDQLQKLGERWTAVCRWTEERWNRLQ
EINILWQELLEEQCLLKAWLTEKEEALNKVQTSNFKDQKELSVSVRRLAILKEDMEMKRQTLDQLSEIGQDVGQL
LDNSKASKKINSDSEELTQRWDSLVQRLEDSSNQVTQAAASASSDQWKRLHLSLQELLVWLQLKDDELSRQAPIG
GDFPAVQKQNDVHRAFKRELKTKEPVIMSTLETVRIFLTEQPLEGLEKLYQEPRELPPEERAQNVTRLLRKQAEE
VNTEWEKLNLHSADQRKIDETLERLQELQEATDELDLKLRQAEVIKGSWQPVGDLLIDSLQDHLEKVKALRGEIA
PLKENVSHVNDLARQLTTLGIQLSPYNLSTLEDLNTRWKLLQVAVEDRVRQLHEAHRDFGPASQHELSTSVQGPW
ERAISPNKVPYYINHETQTTCWDHPKMTELYQSLADLNNVRFSAYRTAMKLRRLQKALCLDLLSLSAACDALDQH
NLKQNDQPMDILQIINCLTTIYDRLEQEHNNLVNVPLCVDMCLNWLLNVYDTGRIGRIRVLSFKTGIISLCKAHL
EDKYRYLFKQVASSTGFCDQRRLGLLLHDSIQIPRQLGEVASFGGSNIEPSVRSCFQFANNKPEIEAALFLDWMR
LEPQSMVWLPVLHRVAAAETAKHQAKCNICKECPIIGFRYRSLKHFNYDICQSCFFSGRVAKGHKMHYPMVEYCT
PTTSGEDVRDFAKVLKNKFRTKRYFAKHPRMGYLPVQTVLEGDNMETPVTLINFWPVDSAPASSPQLSHDDTHSR
IEHYASRLAEMENSNGSYLNDSISPNESIDDEHLLIQHYCQSLNQDSPLSQPRSPAQILISLESEERGELERILA
DLEEENRNLQAEYDRLKQQHEHKGLSPLPSPPEMMPTSPQSP

### Components of the Disclosed Chimeric Constructs

### Micro-Dystrophins

[0065] The disclosure also provides nucleic acids encoding any of the micro-dystrophins optimized for cardiac muscle described herein. Such nucleic acids may be DNA or RNA molecules. These nucleic acids may be used, for example, in methods for making micro-dystrophins or as direct therapeutic agents in a gene therapy approach. A micro-dystrophin protein optimized for cardiac muscle is further understood to include proteins that are variants of any one of SEQ ID Nos. 1-6, 80-84, and 120-125. Variant polypeptides include polypeptides that differ by one or more (e.g., 1, 2, 3, 4, 5, 6, 7, 8, 9, 10, 11, 12, 13, 14, 15, 16, 17, 18, 19, 20, or more) amino acid substitutions, additions, or deletions, and will, therefore, include amino acid sequences that differ from the amino acid sequences designated in any one of SEQ ID Nos. 1-6, 80-84, and 120-125.

[0066] In some embodiments, a micro-dystrophin protein optimized for cardiac muscle comprises an amino acid sequence that is at least 65%, at least 68%, at least 70%, at least 75%, at least 80%, at least 85%, at least 90%, at least 91%, at least 92%, at least 93%, at least 94%, at least 95%, at least 96%, at least 97%, at least 98%, at least 99%, or 100% identical to the amino acid sequence of any one of SEQ ID Nos. 1-6, 80-84, and 120-125.

[0067] In some embodiments, a micro-dystrophin protein optimized for cardiac muscle consists essentially of an amino acid sequence that is at least 65%, at least 68%, at least 70%, at least 75%, at least 80%, at least 85%, at least 90%, at least 91%, at least 92%, at least 93%, at least 94%, at least 95%, at least 96%, at least 97%, at least 98%, at least 99%, or 100% identical to the amino acid sequence of any one of SEQ ID Nos. 1-6, 80-84, and 120-125.

[0068] In some embodiments, a micro-dystrophin protein optimized for cardiac muscle consists of an amino acid sequence that is at least 65%, at least 68%, at least 70%, at least 75%, at least 80%, at least 85%, at least 90%, at least 91%, at least 92%, at least 93%, at least 94%, at least 95%, at least 96%, at least 97%, at least 98%, at least 99%, or 100% identical to the amino acid sequence of any one of SEQ ID Nos. 1-6, 80-84, and 120-125.

[0069] In some embodiments, functional variants or modified forms of micro-dystrophin proteins optimized for cardiac muscle include fusion proteins having at least a portion of the micro-dystrophin protein and one or more fusion domains. Well-known examples of such fusion domains include, but are not limited to, polyhistidine, Glu-Glu, glutathione S transferase (GST), thioredoxin, protein A, protein G, an immunoglobulin heavy chain constant region (Fc), maltose binding protein (MBP), or human serum albumin. A fusion domain may be selected so as to confer a desired property. For example, some fusion domains are particularly useful for isolation of the fusion proteins by affinity chromatography. Other fusion domains are particularly useful for increasing protein stability.

[0070] Non-limiting examples of nucleotide sequences encoding human micro-dystrophin proteins optimized for cardiac muscle are described below.

Nterm-R1_R17-R19_R24+H4+trCterm:
(SEQ ID NO: 7)
ATGCTTTGGTGGGAAGAAGTAGAGGACTGTTATGAAAGAGAAGATGTTCAAAAGAAAACATTCACAAAATGGGTA
AATGCACAATTTTCTAAGTTTGGGAAGCAGCATATTGAGAACCTCTTCAGTGACCTACAGGATGGGAGGCGCCTC
CTAGACCTCCTCGAAGGCCTGACAGGGCAAAAACTGCCAAAAGAAAAAGGATCCACAAGAGTTCATGCCCTGAAC
AATGTCAACAAGGCACTGCGGGTTTTGCAGAACAATAATGTTGATTTAGTGAATATTGGAAGTACTGACATCGTA
GATGGAAATCATAAACTGACTCTTGGTTTGATTTGGAATATAATCCTCCACTGGCAGGTCAAAAATGTAATGAAA
AATATCATGGCTGGATTGCAACAAACCAACAGTGAAAAGATTCTCCTGAGCTGGGTCCGACAATCAACTCGTAAT
TATCCACAGGTTAATGTAATCAACTTCACCACCAGCTGGTCTGATGGCCTGGCTTTGAATGCTCTCATCCATAGT
CATAGGCCAGACCTATTTGACTGGAATAGTGTGGTTTGCCAGCAGTCAGCCACACAACGACTGGAACATGCATTC
AACATCGCCAGATATCAATTAGGCATAGAGAAACTACTCGATCCTGAAGATGTTGATACCACCTATCCAGATAAG
AAGTCCATCTTAATGTACATCACATCACTCTTCCAAGTTTTGCCTCAACAAGTGAGCATTGAAGCCATCCAGGAA
GTGGAAATGTTGCCAAGGCCACCTAAAGTGACTAAAGAAGAACATTTTCAGTTACATCATCAAATGCACTATTCT
CAACAGATCACGGTCAGTCTAGCACAGGGATATGAGAGAACTTCTTCCCCTAAGCCTCGATTCAAGAGCTATGCC
TACACACAGGCTGCTTATGTCACCACCTCTGACCCTACACGGAGCCCATTTCCTTCACAGCATTTGGAAGCTCCT
GAAGACAAGTCATTTGGCAGTTCATTGATGGAGAGTGAAGTAAACCTGGACCGTTATCAAACAGCTTTAGAAGAA
GTATTATCGTGGCTTCTTTCTGCTGAGGACACATTGCAAGCACAAGGAGAGATTTCTAATGATGTGGAAGTGGTG
AAAGACCAGTTTCATACTCATGAGGGGTACATGATGGATTTGACAGCCCATCAGGGCCGGGTTGGTAATATTCTA
CAATTGGGAAGTAAGCTGATTGGAACAGGAAAATTATCAGAAGATGAAGAAACTGAAGTACAAGAGCAGATGAAT
CTCCTAAATTCAAGATGGGAATGCCTCAGGGTAGCTAGCATGGAAAAACAAAGCAATTTACATAGAGTTTTAATG
GATCGATTTGACAGATCTGTTGAGAAATGGCGGCGTTTTCATTATGATATAAAGATATTTAATCAGTGGCTAACA
GAAGCTGAACAGTTTCTCAGAAAGACACAAATTCCTGAGAATTGGGAACATGCTAAATACAAATGGTATCTTAAG
GAACTCCAGGATGGCATTGGGCAGCGGCAAACTGTTGTCAGAACATTGAATGCAACTGGGGAAGAAATAATTCAG
CAATCCTCAAAAACAGATGCCAGTATTCTACAGGAAAAATTGGGAAGCCTGAATCTGCGGTGGCAGGAGGTCTGC
AAACAGCTGTCAGACAGAAAAAAGAGGCTAGAAGAACAAAAGAATATCTTGTCAGAATTTCAAAGAGATTTAAAT
GAATTTGTTTTATGGTTGGAGGAAGCAGATAACATTGCTAGTATCCCACTTGAACCTGGAAAAGAGCAGCAACTA
AAAGAAAAGCTTGAGCAAGTCAAGTTACTGGTGGAAGAGTTGCCCCTGCGCCAGGGAATTCTCAAACAATTAAAT
GAAACTGGAGGACCCGTGCTTGTAAGTGCTCCCATAAGCCCAGAAGAGCAAGATAAACTTGAAAATAAGCTCAAG
CAGACAAATCTCCAGTGGATAAAGGTTTCCAGAGCTTTACCTGAGAAACAAGGAGAAATTGAAGCTCAAATAAAA
GACCTTGGGCAGCTTGAAAAAAAGCTTGAAGACCTTGAAGAGCAGTTAAATCATCTGCTGCTGTGGTTATCTCCT
ATTAGGAATCAGTTGGAAATTTATAACCAACCAAACCAAGAAGGACCATTTGACGTTAAGGAAACTGAAATAGCA
GTTCAAGCTAAACAACCGGATGTGGAAGAGATTTTGTCTAAAGGGCAGCATTTGTACAAGGAAAAACCAGCCACT
CAGCCAGTGAAGAGGAAGTTAGAAGATCTGAGCTCTGAGTGGAAGGCGGTAAACCGTTTACTTCAAGAGCTGAGG
GCAAAGCAGTGGCAGAGAAAAATAGATGAGACCCTTGAAAGACTCCGGGAACTTCAAGAGGCCACGGATGAGCTG
GACCTCAAGCTGCGCCAAGCTGAGGTGATCAAGGGATCCTGGCAGCCCGTGGGCGATCTCCTCATTGACTCTCTC
CAAGATCACCTCGAGAAAGTCAAGGCACTTCGAGGAGAAATTGCGCCTCTGAAAGAGAACGTGAGCCACGTCAAT
GACCTTGCTCGCCAGCTTACCACTTTGGGCATTCAGCTCTCACCGTATAACCTCAGCACTCTGGAAGACCTGAAC
ACCAGATGGAAGCTTCTGCAGGTGGCCGTCGAGGACCGAGTCAGGCAGCTGCATGAAGCCCACAGGGACTTTGGT
CCAGCATCTCAGCACTTTCTTTCCACGTCTGTCCAGGGTCCCTGGGAGAGAGCCATCTCGCCAAACAAAGTGCCC
TACTATATCAACCACGAGACTCAAACAACTTGCTGGGACCATCCCAAAATGACAGAGCTCTACCAGTCTTTAGCT
GACCTGAATAATGTCAGATTCTCAGCTTATAGGACTGCCATGAAACTCCGAAGACTGCAGAAGGCCCTTTGCTTG
GATCTCTTGAGCCTGTCAGCTGCATGTGATGCCTTGGACCAGCACAACCTCAAGCAAAATGACCAGCCCATGGAT
ATCCTGCAGATTATTAATTGTTTGACCACTATTTATGACCGCCTGGAGCAAGAGCACAACAATTTGGTCAACGTC
CCTCTCTGCGTGGATATGTGTCTGAACTGGCTGCTGAATGTTTATGATACGGGACGAACAGGGAGGATCCGTGTC
CTGTCTTTTAAAACTGGCATCATTTCCCTGTGTAAAGCACATTTGGAAGACAAGTACAGATACCTTTTCAAGCAA
GTGGCAAGTTCAACAGGATTTTGTGACCAGCGCAGGCTGGGCCTCCTTCTGCATGATTCTATCCAAATTCCAAGA
CAGTTGGGTGAAGTTGCATCCTTTGGGGGCAGTAACATTGAGCCAAGTGTCCGGAGCTGCTTCCAATTTGCTAAT
AATAAGCCAGAGATCGAAGCGGCCCTCTTCCTAGACTGGATGAGACTGGAACCCCAGTCCATGGTGTGGCTGCCC
GTCCTGCACAGAGTGGCTGCTGCAGAAACTGCCAAGCATCAGGCCAAATGTAACATCTGCAAAGAGTGTCCAATC
ATTGGATTCAGGTACAGGAGTCTAAAGCACTTTAATTATGACATCTGCCAAAGCTGCTTTTTTTCTGGTCGAGTT
GCAAAAGGCCATAAAATGCACTATCCCATGGTGGAATATTGCACTCCGACTACATCAGGAGAAGATGTTCGAGAC
TTTGCCAAGGTACTAAAAAACAAATTTCGAACCAAAAGGTATTTTGCGAAGCATCCCCGAATGGGCTACCTGCCA
GTGCAGACTGTCTTAGAGGGGGACAACATGGAAACTCCC
Nterm-R1_R17-R19_R24+H4+trCterm:
(SEQ ID NO: 126)
ATGCTTTGGTGGGAAGAAGTAGAGGACTGTTATGAAAGAGAAGATGTTCAAAAGAAAACATTCACAAAATGGGTA
AATGCACAATTTTCTAAGTTTGGGAAGCAGCATATTGAGAACCTCTTCAGTGACCTACAGGATGGGAGGCGCCTC
CTAGACCTCCTCGAAGGCCTGACAGGGCAAAAACTGCCAAAAGAAAAAGGATCCACAAGAGTTCATGCCCTGAAC
AATGTCAACAAGGCACTGCGGGTTTTGCAGAACAATAATGTTGATTTAGTGAATATTGGAAGTACTGACATCGTA
GATGGAAATCATAAACTGACTCTTGGTTTGATTTGGAATATAATCCTCCACTGGCAGGTCAAAAATGTAATGAAA
AATATCATGGCTGGATTGCAACAAACCAACAGTGAAAAGATTCTCCTGAGCTGGGTCCGACAATCAACTCGTAAT
TATCCACAGGTTAATGTAATCAACTTCACCACCAGCTGGTCTGATGGCCTGGCTTTGAATGCTCTCATCCATAGT
CATAGGCCAGACCTATTTGACTGGAATAGTGTGGTTTGCCAGCAGTCAGCCACACAACGACTGGAACATGCATTC
AACATCGCCAGATATCAATTAGGCATAGAGAAACTACTCGATCCTGAAGATGTTGATACCACCTATCCAGATAAG
AAGTCCATCTTAATGTACATCACATCACTCTTCCAAGTTTTGCCTCAACAAGTGAGCATTGAAGCCATCCAGGAA
GTGGAAATGTTGCCAAGGCCACCTAAAGTGACTAAAGAAGAACATTTTCAGTTACATCATCAAATGCACTATTCT
CAACAGATCACGGTCAGTCTAGCACAGGGATATGAGAGAACTTCTTCCCCTAAGCCTCGATTCAAGAGCTATGCC
TACACACAGGCTGCTTATGTCACCACCTCTGACCCTACACGGAGCCCATTTCCTTCACAGCATTTGGAAGCTCCT
GAAGACAAGTCATTTGGCAGTTCATTGATGGAGAGTGAAGTAAACCTGGACCGTTATCAAACAGCTTTAGAAGAA
GTATTATCGTGGCTTCTTTCTGCTGAGGACACATTGCAAGCACAAGGAGAGATTTCTAATGATGTGGAAGTGGTG
AAAGACCAGTTTCATACTCATGAGGGGTACATGATGGATTTGACAGCCCATCAGGGCCGGGTTGGTAATATTCTA
CAATTGGGAAGTAAGCTGATTGGAACAGGAAAATTATCAGAAGATGAAGAAACTGAAGTACAAGAGCAGATGAAT
CTCCTAAATTCAAGATGGGAATGCCTCAGGGTAGCTAGCATGGAAAAACAAAGCAATTTACATAGAGTTTTAATG
GATAGATCTGTTGAGAAATGGCGGCGTTTTCATTATGATATAAAGATATTTAATCAGTGGCTAACAGAAGCTGAA
CAGTTTCTCAGAAAGACACAAATTCCTGAGAATTGGGAACATGCTAAATACAAATGGTATCTTAAGGAACTCCAG
GATGGCATTGGGCAGCGGCAAACTGTTGTCAGAACATTGAATGCAACTGGGGAAGAAATAATTCAGCAATCCTCA
AAAACAGATGCCAGTATTCTACAGGAAAAATTGGGAAGCCTGAATCTGCGGTGGCAGGAGGTCTGCAAACAGCTG
TCAGACAGAAAAAAGAGGCTAGAAGAACAAAAGAATATCTTGTCAGAATTTCAAAGAGATTTAAATGAATTTGTT
TTATGGTTGGAGGAAGCAGATAACATTGCTAGTATCCCACTTGAACCTGGAAAAGAGCAGCAACTAAAAGAAAAG
CTTGAGCAAGTCAAGTTACTGGTGGAAGAGTTGCCCCTGCGCCAGGGAATTCTCAAACAATTAAATGAAACTGGA
GGACCCGTGCTTGTAAGTGCTCCCATAAGCCCAGAAGAGCAAGATAAACTTGAAAATAAGCTCAAGCAGACAAAT
CTCCAGTGGATAAAGGTTTCCAGAGCTTTACCTGAGAAACAAGGAGAAATTGAAGCTCAAATAAAAGACCTTGGG
CAGCTTGAAAAAAAGCTTGAAGACCTTGAAGAGCAGTTAAATCATCTGCTGCTGTGGTTATCTCCTATTAGGAAT
CAGTTGGAAATTTATAACCAACCAAACCAAGAAGGACCATTIGACGTTAAGGAAACTGAAATAGCAGTTCAAGCT
AAACAACCGGATGTGGAAGAGATTTTGTCTAAAGGGCAGCATTTGTACAAGGAAAAACCAGCCACTCAGCCAGTG
AAGAGGAAGTTAGAAGATCTGAGCTCTGAGTGGAAGGCGGTAAACCGTTTACTTCAAGAGCTGAGGGCAAAGCAG
TGGCAGAGAAAAATAGATGAGACCCTTGAAAGACTCCGGGAACTTCAAGAGGCCACGGATGAGCTGGACCTCAAG
CTGCGCCAAGCTGAGGTGATCAAGGGATCCTGGCAGCCCGTGGGCGATCTCCTCATTGACTCTCTCCAAGATCAC
CTCGAGAAAGTCAAGGCACTTCGAGGAGAAATTGCGCCTCTGAAAGAGAACGTGAGCCACGTCAATGACCTTGCT
CGCCAGCTTACCACTTTGGGCATTCAGCTCTCACCGTATAACCTCAGCACTCTGGAAGACCTGAACACCAGATGG
AAGCTTCTGCAGGTGGCCGTCGAGGACCGAGTCAGGCAGCTGCATGAAGCCCACAGGGACTTTGGTCCAGCATCT
CAGCACTTTCTTTCCACGTCTGTCCAGGGTCCCTGGGAGAGAGCCATCTCGCCAAACAAAGTGCCCTACTATATC
AACCACGAGACTCAAACAACTTGCTGGGACCATCCCAAAATGACAGAGCTCTACCAGTCTTTAGCTGACCTGAAT
AATGTCAGATTCTCAGCTTATAGGACTGCCATGAAACTCCGAAGACTGCAGAAGGCCCTTTGCTTGGATCTCTTG
AGCCTGTCAGCTGCATGTGATGCCTTGGACCAGCACAACCTCAAGCAAAATGACCAGCCCATGGATATCCTGCAG
ATTATTAATTGTTTGACCACTATTTATGACCGCCTGGAGCAAGAGCACAACAATTTGGTCAACGTCCCTCTCTGC
GTGGATATGTGTCTGAACTGGCTGCTGAATGTTTATGATACGGGACGAACAGGGAGGATCCGTGTCCTGTCTTTT
AAAACTGGCATCATTTCCCTGTGTAAAGCACATTTGGAAGACAAGTACAGATACCTTTTCAAGCAAGTGGCAAGT
TCAACAGGATTTTGTGACCAGCGCAGGCTGGGCCTCCTTCTGCATGATTCTATCCAAATTCCAAGACAGTTGGGT
GAAGTTGCATCCTTTGGGGGCAGTAACATTGAGCCAAGTGTCCGGAGCTGCTTCCAATTTGCTAATAATAAGCCA
GAGATCGAAGCGGCCCTCTTCCTAGACTGGATGAGACTGGAACCCCAGTCCATGGTGTGGCTGCCCGTCCTGCAC
AGAGTGGCTGCTGCAGAAACTGCCAAGCATCAGGCCAAATGTAACATCTGCAAAGAGTGTCCAATCATTGGATTC
AGGTACAGGAGTCTAAAGCACTTTAATTATGACATCTGCCAAAGCTGCTTTTTTTCTGGTCGAGTTGCAAAAGGC
CATAAAATGCACTATCCCATGGTGGAATATTGCACTCCGACTACATCAGGAGAAGATGTTCGAGACTTTGCCAAG
GTACTAAAAAACAAATTTCGAACCAAAAGGTATTTTGCGAAGCATCCCCGAATGGGCTACCTGCCAGTGCAGACT
GTCTTAGAGGGGGACAACATGGAAACTCCC
Nterm-R1_R17-R19_H4 to 1st coiled coil and proline rich
region that follows:
(SEQ ID NO: 8)
ATGCTTTGGTGGGAAGAAGTAGAGGACTGTTATGAAAGAGAAGATGTTCAAAAGAAAACATTCACAAAATGGGTA
AATGCACAATTTTCTAAGTTTGGGAAGCAGCATATTGAGAACCTCTTCAGTGACCTACAGGATGGGAGGCGCCTC
CTAGACCTCCTCGAAGGCCTGACAGGGCAAAAACTGCCAAAAGAAAAAGGATCCACAAGAGTTCATGCCCTGAAC
AATGTCAACAAGGCACTGCGGGTTTTGCAGAACAATAATGTTGATTTAGTGAATATTGGAAGTACTGACATCGTA
GATGGAAATCATAAACTGACTCTTGGTTTGATTTGGAATATAATCCTCCACTGGCAGGTCAAAAATGTAATGAAA
AATATCATGGCTGGATTGCAACAAACCAACAGTGAAAAGATTCTCCTGAGCTGGGTCCGACAATCAACTCGTAAT
TATCCACAGGTTAATGTAATCAACTTCACCACCAGCTGGTCTGATGGCCTGGCTTTGAATGCTCTCATCCATAGT
CATAGGCCAGACCTATTTGACTGGAATAGTGTGGTTTGCCAGCAGTCAGCCACACAACGACTGGAACATGCATTC
AACATCGCCAGATATCAATTAGGCATAGAGAAACTACTCGATCCTGAAGATGTTGATACCACCTATCCAGATAAG
AAGTCCATCTTAATGTACATCACATCACTCTTCCAAGTTTTGCCTCAACAAGTGAGCATTGAAGCCATCCAGGAA
GTGGAAATGTTGCCAAGGCCACCTAAAGTGACTAAAGAAGAACATTTTCAGTTACATCATCAAATGCACTATTCT
CAACAGATCACGGTCAGTCTAGCACAGGGATATGAGAGAACTTCTTCCCCTAAGCCTCGATTCAAGAGCTATGCC
TACACACAGGCTGCTTATGTCACCACCTCTGACCCTACACGGAGCCCATTTCCTTCACAGCATTTGGAAGCTCCT
GAAGACAAGTCATTTGGCAGTTCATTGATGGAGAGTGAAGTAAACCTGGACCGTTATCAAACAGCTTTAGAAGAA
GTATTATCGTGGCTTCTTTCTGCTGAGGACACATTGCAAGCACAAGGAGAGATTTCTAATGATGTGGAAGTGGTG
AAAGACCAGTTTCATACTCATGAGGGGTACATGATGGATTTGACAGCCCATCAGGGCCGGGTTGGTAATATTCTA
CAATTGGGAAGTAAGCTGATTGGAACAGGAAAATTATCAGAAGATGAAGAAACTGAAGTACAAGAGCAGATGAAT
CTCCTAAATTCAAGATGGGAATGCCTCAGGGTAGCTAGCATGGAAAAACAAAGCAATTTACATAGAGTTTTAATG
GATCGATTTGACAGATCTGTTGAGAAATGGCGGCGTTTTCATTATGATATAAAGATATTTAATCAGTGGCTAACA
GAAGCTGAACAGTTTCTCAGAAAGACACAAATTCCTGAGAATTGGGAACATGCTAAATACAAATGGTATCTTAAG
GAACTCCAGGATGGCATTGGGCAGCGGCAAACTGTTGTCAGAACATTGAATGCAACTGGGGAAGAAATAATTCAG
CAATCCTCAAAAACAGATGCCAGTATTCTACAGGAAAAATTGGGAAGCCTGAATCTGCGGTGGCAGGAGGTCTGC
AAACAGCTGTCAGACAGAAAAAAGAGGCTAGAAGAACAAAAGAATATCTTGTCAGAATTTCAAAGAGATTTAAAT
GAATTTGTTTTATGGTTGGAGGAAGCAGATAACATTGCTAGTATCCCACTTGAACCTGGAAAAGAGCAGCAACTA
AAAGAAAAGCTTGAGCAAGTCAAGTTACTGGTGGAAGAGTTGCCCCTGCGCCAGGGAATTCTCAAACAATTAAAT
GAAACTGGAGGACCCGTGCTTGTAAGTGCTCCCATAAGCCCAGAAGAGCAAGATAAACTTGAAAATAAGCTCAAG
CAGACAAATCTCCAGTGGATAAAGGTTTCCAGAGCTTTACCTGAGAAACAAGGAGAAATTGAAGCTCAAATAAAA
GACCTTGGGCAGCTTGAAAAAAAGCTTGAAGACCTTGAAGAGCAGTTAAATCATCTGCTGCTGTGGTTATCTCCT
ATTAGGAATCAGTTGGAAATTTATAACCAACCAAACCAAGAAGGACCATTTGACGTTAAGGAAACTGAAATAGCA
GTTCAAGCTAAACAACCGGATGTGGAAGAGATTTTGTCTAAAGGGCAGCATTTGTACAAGGAAAAACCAGCCACT
CAGCCAGTGAAGAGGAAGTTAGAAGATCTGAGCTCTGAGTGGAAGGCGGTAAACCGTTTACTTCAAGAGCTGAGG
GCAAAGCAGGGTCCAGCATCTCAGCACTTTCTTTCCACGTCTGTCCAGGGTCCCTGGGAGAGAGCCATCTCGCCA
AACAAAGTGCCCTACTATATCAACCACGAGACTCAAACAACTTGCTGGGACCATCCCAAAATGACAGAGCTCTAC
CAGTCTTTAGCTGACCTGAATAATGTCAGATTCTCAGCTTATAGGACTGCCATGAAACTCCGAAGACTGCAGAAG
GCCCTTTGCTTGGATCTCTTGAGCCTGTCAGCTGCATGTGATGCCTTGGACCAGCACAACCTCAAGCAAAATGAC
CAGCCCATGGATATCCTGCAGATTATTAATTGTTTGACCACTATTTATGACCGCCTGGAGCAAGAGCACAACAAT
TTGGTCAACGTCCCTCTCTGCGTGGATATGTGTCTGAACTGGCTGCTGAATGTTTATGATACGGGACGAACAGGG
AGGATCCGTGTCCTGTCTTTTAAAACTGGCATCATTTCCCTGTGTAAAGCACATTTGGAAGACAAGTACAGATAC
CTTTTCAAGCAAGTGGCAAGTTCAACAGGATTTTGTGACCAGCGCAGGCTGGGCCTCCTTCTGCATGATTCTATC
CAAATTCCAAGACAGTTGGGTGAAGTTGCATCCTTTGGGGGCAGTAACATTGAGCCAAGTGTCCGGAGCTGCTTC
CAATTTGCTAATAATAAGCCAGAGATCGAAGCGGCCCTCTTCCTAGACTGGATGAGACTGGAACCCCAGTCCATG
GTGTGGCTGCCCGTCCTGCACAGAGTGGCTGCTGCAGAAACTGCCAAGCATCAGGCCAAATGTAACATCTGCAAA
GAGTGTCCAATCATTGGATTCAGGTACAGGAGTCTAAAGCACTTTAATTATGACATCTGCCAAAGCTGCTTTTTT
TCTGGTCGAGTTGCAAAAGGCCATAAAATGCACTATCCCATGGTGGAATATTGCACTCCGACTACATCAGGAGAA
GATGTTCGAGACTTTGCCAAGGTACTAAAAAACAAATTTCGAACCAAAAGGTATTTTGCGAAGCATCCCCGAATG
GGCTACCTGCCAGTGCAGACTGTCTTAGAGGGGGACAACATGGAAACTCCCGTTACTCTGATCAACTTCTGGCCA
GTAGATTCTGCGCCTGCCTCGTCCCCTCAGCTTTCACACGATGATACTCATTCACGCATTGAACATTATGCTAGC
AGGCTAGCAGAAATGGAAAACAGCAATGGATCTTATCTAAATGATAGCATCTCTCCTAATGAGAGCATAGATGAT
GAACATTTGTTAATCCAGCATTACTGCCAAAGTTTGAACCAGGACTCCCCCCTGAGCCAGCCTCGTAGTCCTGCC
CAGATCTTGATTTCCTTAGAGAGTGAGGAAAGAGGGGAGCTAGAGAGAATCCTAGCAGATCTTGAGGAAGAAAAC
AGGAATCTGCAAGCAGAATATGACCGTCTAAAGCAGCAGCACGAACATAAAGGCCTGTCCCCACTGCCGTCCCCT
CCTGAAATGATGCCCACCTCTCCCCAGAGTCCC
Nterm-R1_R17-R19_H4 to 1st coiled coil and proline rich
region that follows:
(SEQ ID NO: 127)
ATGCTTTGGTGGGAAGAAGTAGAGGACTGTTATGAAAGAGAAGATGTTCAAAAGAAAACATTCACAAAATGGGTA
AATGCACAATTTTCTAAGTTTGGGAAGCAGCATATTGAGAACCTCTTCAGTGACCTACAGGATGGGAGGCGCCTC
CTAGACCTCCTCGAAGGCCTGACAGGGCAAAAACTGCCAAAAGAAAAAGGATCCACAAGAGTTCATGCCCTGAAC
AATGTCAACAAGGCACTGCGGGTTTTGCAGAACAATAATGTTGATTTAGTGAATATTGGAAGTACTGACATCGTA
GATGGAAATCATAAACTGACTCTTGGTTTGATTTGGAATATAATCCTCCACTGGCAGGTCAAAAATGTAATGAAA
AATATCATGGCTGGATTGCAACAAACCAACAGTGAAAAGATTCTCCTGAGCTGGGTCCGACAATCAACTCGTAAT
TATCCACAGGTTAATGTAATCAACTTCACCACCAGCTGGTCTGATGGCCTGGCTTTGAATGCTCTCATCCATAGT
CATAGGCCAGACCTATTTGACTGGAATAGTGTGGTTTGCCAGCAGTCAGCCACACAACGACTGGAACATGCATTC
AACATCGCCAGATATCAATTAGGCATAGAGAAACTACTCGATCCTGAAGATGTTGATACCACCTATCCAGATAAG
AAGTCCATCTTAATGTACATCACATCACTCTTCCAAGTTTTGCCTCAACAAGTGAGCATTGAAGCCATCCAGGAA
GTGGAAATGTTGCCAAGGCCACCTAAAGTGACTAAAGAAGAACATTTTCAGTTACATCATCAAATGCACTATTCT
CAACAGATCACGGTCAGTCTAGCACAGGGATATGAGAGAACTTCTTCCCCTAAGCCTCGATTCAAGAGCTATGCC
TACACACAGGCTGCTTATGTCACCACCTCTGACCCTACACGGAGCCCATTTCCTTCACAGCATTTGGAAGCTCCT
GAAGACAAGTCATTTGGCAGTTCATTGATGGAGAGTGAAGTAAACCTGGACCGTTATCAAACAGCTTTAGAAGAA
GTATTATCGTGGCTTCTTTCTGCTGAGGACACATTGCAAGCACAAGGAGAGATTTCTAATGATGTGGAAGTGGTG
AAAGACCAGTTTCATACTCATGAGGGGTACATGATGGATTTGACAGCCCATCAGGGCCGGGTTGGTAATATTCTA
CAATTGGGAAGTAAGCTGATTGGAACAGGAAAATTATCAGAAGATGAAGAAACTGAAGTACAAGAGCAGATGAAT
CTCCTAAATTCAAGATGGGAATGCCTCAGGGTAGCTAGCATGGAAAAACAAAGCAATTTACATAGAGTTTTAATG
GATAGATCTGTTGAGAAATGGCGGCGTTTTCATTATGATATAAAGATATTTAATCAGTGGCTAACAGAAGCTGAA
CAGTTTCTCAGAAAGACACAAATTCCTGAGAATTGGGAACATGCTAAATACAAATGGTATCTTAAGGAACTCCAG
GATGGCATTGGGCAGCGGCAAACTGTTGTCAGAACATTGAATGCAACTGGGGAAGAAATAATTCAGCAATCCTCA
AAAACAGATGCCAGTATTCTACAGGAAAAATTGGGAAGCCTGAATCTGCGGTGGCAGGAGGTCTGCAAACAGCTG
TCAGACAGAAAAAAGAGGCTAGAAGAACAAAAGAATATCTTGTCAGAATTTCAAAGAGATTTAAATGAATTTGTT
TTATGGTTGGAGGAAGCAGATAACATTGCTAGTATCCCACTTGAACCTGGAAAAGAGCAGCAACTAAAAGAAAAG
CTTGAGCAAGTCAAGTTACTGGTGGAAGAGTTGCCCCTGCGCCAGGGAATTCTCAAACAATTAAATGAAACTGGA
GGACCCGTGCTTGTAAGTGCTCCCATAAGCCCAGAAGAGCAAGATAAACTTGAAAATAAGCTCAAGCAGACAAAT
CTCCAGTGGATAAAGGTTTCCAGAGCTTTACCTGAGAAACAAGGAGAAATTGAAGCTCAAATAAAAGACCTTGGG
CAGCTTGAAAAAAAGCTTGAAGACCTTGAAGAGCAGTTAAATCATCTGCTGCTGTGGTTATCTCCTATTAGGAAT
CAGTTGGAAATTTATAACCAACCAAACCAAGAAGGACCATTTGACGTTAAGGAAACTGAAATAGCAGTTCAAGCT
AAACAACCGGATGTGGAAGAGATTTTGTCTAAAGGGCAGCATTTGTACAAGGAAAAACCAGCCACTCAGCCAGTG
AAGAGGAAGTTAGAAGATCTGAGCTCTGAGTGGAAGGCGGTAAACCGTTTACTTCAAGAGCTGAGGGCAAAGCAG
GGTCCAGCATCTCAGCACTTTCTTTCCACGTCTGTCCAGGGTCCCTGGGAGAGAGCCATCTCGCCAAACAAAGTG
CCCTACTATATCAACCACGAGACTCAAACAACTTGCTGGGACCATCCCAAAATGACAGAGCTCTACCAGTCTTTA
GCTGACCTGAATAATGTCAGATTCTCAGCTTATAGGACTGCCATGAAACTCCGAAGACTGCAGAAGGCCCTTTGC
TTGGATCTCTTGAGCCTGTCAGCTGCATGTGATGCCTTGGACCAGCACAACCTCAAGCAAAATGACCAGCCCATG
GATATCCTGCAGATTATTAATTGTTTGACCACTATTTATGACCGCCTGGAGCAAGAGCACAACAATTTGGTCAAC
GTCCCTCTCTGCGTGGATATGTGTCTGAACTGGCTGCTGAATGTTTATGATACGGGACGAACAGGGAGGATCCGT
GTCCTGTCTTTTAAAACTGGCATCATTTCCCTGTGTAAAGCACATTTGGAAGACAAGTACAGATACCTTTTCAAG
CAAGTGGCAAGTTCAACAGGATTTTGTGACCAGCGCAGGCTGGGCCTCCTTCTGCATGATTCTATCCAAATTCCA
AGACAGTTGGGTGAAGTTGCATCCTTTGGGGGCAGTAACATTGAGCCAAGTGTCCGGAGCTGCTTCCAATTTGCT
AATAATAAGCCAGAGATCGAAGCGGCCCTCTTCCTAGACTGGATGAGACTGGAACCCCAGTCCATGGTGTGGCTG
CCCGTCCTGCACAGAGTGGCTGCTGCAGAAACTGCCAAGCATCAGGCCAAATGTAACATCTGCAAAGAGTGTCCA
ATCATTGGATTCAGGTACAGGAGTCTAAAGCACTTTAATTATGACATCTGCCAAAGCTGCTTTTTTTCTGGTCGA
GTTGCAAAAGGCCATAAAATGCACTATCCCATGGTGGAATATTGCACTCCGACTACATCAGGAGAAGATGTTCGA
GACTTTGCCAAGGTACTAAAAAACAAATTTCGAACCAAAAGGTATTTTGCGAAGCATCCCCGAATGGGCTACCTG
CCAGTGCAGACTGTCTTAGAGGGGGACAACATGGAAACTCCCGTTACTCTGATCAACTTCTGGCCAGTAGATTCT
GCGCCTGCCTCGTCCCCTCAGCTTTCACACGATGATACTCATTCACGCATTGAACATTATGCTAGCAGGCTAGCA
GAAATGGAAAACAGCAATGGATCTTATCTAAATGATAGCATCTCTCCTAATGAGAGCATAGATGATGAACATTTG
TTAATCCAGCATTACTGCCAAAGTTTGAACCAGGACTCCCCCCTGAGCCAGCCTCGTAGTCCTGCCCAGATCTTG
ATTTCCTTAGAGAGTGAGGAAAGAGGGGAGCTAGAGAGAATCCTAGCAGATCTTGAGGAAGAAAACAGGAATCTG
CAAGCAGAATATGACCGTCTAAAGCAGCAGCACGAACATAAAGGCCTGTCCCCACTGCCGTCCCCTCCTGAAATG
ATGCCCACCTCTCCCCAGAGTCCC
Nterm-R1_R17-R19_H4 to end of syntrophin region:
(SEQ ID NO: 9)
ATGCTTTGGTGGGAAGAAGTAGAGGACTGTTATGAAAGAGAAGATGTTCAAAAGAAAACATTCACAAAATGGGTA
AATGCACAATTTTCTAAGTTTGGGAAGCAGCATATTGAGAACCTCTTCAGTGACCTACAGGATGGGAGGCGCCTC
CTAGACCTCCTCGAAGGCCTGACAGGGCAAAAACTGCCAAAAGAAAAAGGATCCACAAGAGTTCATGCCCTGAAC
AATGTCAACAAGGCACTGCGGGTTTTGCAGAACAATAATGTTGATTTAGTGAATATTGGAAGTACTGACATCGTA
GATGGAAATCATAAACTGACTCTTGGTTTGATTTGGAATATAATCCTCCACTGGCAGGTCAAAAATGTAATGAAA
AATATCATGGCTGGATTGCAACAAACCAACAGTGAAAAGATTCTCCTGAGCTGGGTCCGACAATCAACTCGTAAT
TATCCACAGGTTAATGTAATCAACTTCACCACCAGCTGGTCTGATGGCCTGGCTTTGAATGCTCTCATCCATAGT
CATAGGCCAGACCTATTTGACTGGAATAGTGTGGTTTGCCAGCAGTCAGCCACACAACGACTGGAACATGCATTC
AACATCGCCAGATATCAATTAGGCATAGAGAAACTACTCGATCCTGAAGATGTTGATACCACCTATCCAGATAAG
AAGTCCATCTTAATGTACATCACATCACTCTTCCAAGTTTTGCCTCAACAAGTGAGCATTGAAGCCATCCAGGAA
GTGGAAATGTTGCCAAGGCCACCTAAAGTGACTAAAGAAGAACATTTTCAGTTACATCATCAAATGCACTATTCT
CAACAGATCACGGTCAGTCTAGCACAGGGATATGAGAGAACTTCTTCCCCTAAGCCTCGATTCAAGAGCTATGCC
TACACACAGGCTGCTTATGTCACCACCTCTGACCCTACACGGAGCCCATTTCCTTCACAGCATTTGGAAGCTCCT
GAAGACAAGTCATTTGGCAGTTCATTGATGGAGAGTGAAGTAAACCTGGACCGTTATCAAACAGCTTTAGAAGAA
GTATTATCGTGGCTTCTTTCTGCTGAGGACACATTGCAAGCACAAGGAGAGATTTCTAATGATGTGGAAGTGGTG
AAAGACCAGTTTCATACTCATGAGGGGTACATGATGGATTTGACAGCCCATCAGGGCCGGGTTGGTAATATTCTA
CAATTGGGAAGTAAGCTGATTGGAACAGGAAAATTATCAGAAGATGAAGAAACTGAAGTACAAGAGCAGATGAAT
CTCCTAAATTCAAGATGGGAATGCCTCAGGGTAGCTAGCATGGAAAAACAAAGCAATTTACATAGAGTTTTAATG
GATCGATTTGACAGATCTGTTGAGAAATGGCGGCGTTTTCATTATGATATAAAGATATTTAATCAGTGGCTAACA
GAAGCTGAACAGTTTCTCAGAAAGACACAAATTCCTGAGAATTGGGAACATGCTAAATACAAATGGTATCTTAAG
GAACTCCAGGATGGCATTGGGCAGCGGCAAACTGTTGTCAGAACATTGAATGCAACTGGGGAAGAAATAATTCAG
CAATCCTCAAAAACAGATGCCAGTATTCTACAGGAAAAATTGGGAAGCCTGAATCTGCGGTGGCAGGAGGTCTGC
AAACAGCTGTCAGACAGAAAAAAGAGGCTAGAAGAACAAAAGAATATCTTGTCAGAATTTCAAAGAGATTTAAAT
GAATTTGTTTTATGGTTGGAGGAAGCAGATAACATTGCTAGTATCCCACTTGAACCTGGAAAAGAGCAGCAACTA
AAAGAAAAGCTTGAGCAAGTCAAGTTACTGGTGGAAGAGTTGCCCCTGCGCCAGGGAATTCTCAAACAATTAAAT
GAAACTGGAGGACCCGTGCTTGTAAGTGCTCCCATAAGCCCAGAAGAGCAAGATAAACTTGAAAATAAGCTCAAG
CAGACAAATCTCCAGTGGATAAAGGTTTCCAGAGCTTTACCTGAGAAACAAGGAGAAATTGAAGCTCAAATAAAA
GACCTTGGGCAGCTTGAAAAAAAGCTTGAAGACCTTGAAGAGCAGTTAAATCATCTGCTGCTGTGGTTATCTCCT
ATTAGGAATCAGTTGGAAATTTATAACCAACCAAACCAAGAAGGACCATTTGACGTTAAGGAAACTGAAATAGCA
GTTCAAGCTAAACAACCGGATGTGGAAGAGATTTTGTCTAAAGGGCAGCATTTGTACAAGGAAAAACCAGCCACT
CAGCCAGTGAAGAGGAAGTTAGAAGATCTGAGCTCTGAGTGGAAGGCGGTAAACCGTTTACTTCAAGAGCTGAGG
GCAAAGCAGGGTCCAGCATCTCAGCACTTTCTTTCCACGTCTGTCCAGGGTCCCTGGGAGAGAGCCATCTCGCCA
AACAAAGTGCCCTACTATATCAACCACGAGACTCAAACAACTTGCTGGGACCATCCCAAAATGACAGAGCTCTAC
CAGTCTTTAGCTGACCTGAATAATGTCAGATTCTCAGCTTATAGGACTGCCATGAAACTCCGAAGACTGCAGAAG
GCCCTTTGCTTGGATCTCTTGAGCCTGTCAGCTGCATGTGATGCCTTGGACCAGCACAACCTCAAGCAAAATGAC
CAGCCCATGGATATCCTGCAGATTATTAATTGTTTGACCACTATTTATGACCGCCTGGAGCAAGAGCACAACAAT
TTGGTCAACGTCCCTCTCTGCGTGGATATGTGTCTGAACTGGCTGCTGAATGTTTATGATACGGGACGAACAGGG
AGGATCCGTGTCCTGTCTTTTAAAACTGGCATCATTTCCCTGTGTAAAGCACATTTGGAAGACAAGTACAGATAC
CTTTTCAAGCAAGTGGCAAGTTCAACAGGATTTTGTGACCAGCGCAGGCTGGGCCTCCTTCTGCATGATTCTATC
CAAATTCCAAGACAGTTGGGTGAAGTTGCATCCTTTGGGGGCAGTAACATTGAGCCAAGTGTCCGGAGCTGCTTC
CAATTTGCTAATAATAAGCCAGAGATCGAAGCGGCCCTCTTCCTAGACTGGATGAGACTGGAACCCCAGTCCATG
GTGTGGCTGCCCGTCCTGCACAGAGTGGCTGCTGCAGAAACTGCCAAGCATCAGGCCAAATGTAACATCTGCAAA
GAGTGTCCAATCATTGGATTCAGGTACAGGAGTCTAAAGCACTTTAATTATGACATCTGCCAAAGCTGCTTTTTT
TCTGGTCGAGTTGCAAAAGGCCATAAAATGCACTATCCCATGGTGGAATATTGCACTCCGACTACATCAGGAGAA
GATGTTCGAGACTTTGCCAAGGTACTAAAAAACAAATTTCGAACCAAAAGGTATTTTGCGAAGCATCCCCGAATG
GGCTACCTGCCAGTGCAGACTGTCTTAGAGGGGGACAACATGGAAACTCCCGTTACTCTGATCAACTTCTGGCCA
GTAGATTCTGCGCCTGCCTCGTCCCCTCAGCTTTCACACGATGATACTCATTCACGCATTGAACATTATGCTAGC
AGGCTAGCAGAAATGGAAAACAGCAATGGATCTTATCTAAATGATAGCATCTCTCCTAATGAGAGCATAGATGAT
GAACATTTGTTAATCCAGCATTACTGCCAAAGTTTGAACCAGGACTCCCCCCTGAGCCAGCCTCGTAGT
Nterm-R1_R17-R19_H4 to end of syntrophin region:
(SEQ ID NO: 128)
ATGCTTTGGTGGGAAGAAGTAGAGGACTGTTATGAAAGAGAAGATGTTCAAAAGAAAACATTCACAAAATGGGTA
AATGCACAATTTTCTAAGTTTGGGAAGCAGCATATTGAGAACCTCTTCAGTGACCTACAGGATGGGAGGCGCCTC
CTAGACCTCCTCGAAGGCCTGACAGGGCAAAAACTGCCAAAAGAAAAAGGATCCACAAGAGTTCATGCCCTGAAC
AATGTCAACAAGGCACTGCGGGTTTTGCAGAACAATAATGTTGATTTAGTGAATATTGGAAGTACTGACATCGTA
GATGGAAATCATAAACTGACTCTTGGTTTGATTTGGAATATAATCCTCCACTGGCAGGTCAAAAATGTAATGAAA
AATATCATGGCTGGATTGCAACAAACCAACAGTGAAAAGATTCTCCTGAGCTGGGTCCGACAATCAACTCGTAAT
TATCCACAGGTTAATGTAATCAACTTCACCACCAGCTGGTCTGATGGCCTGGCTTTGAATGCTCTCATCCATAGT
CATAGGCCAGACCTATTTGACTGGAATAGTGTGGTTTGCCAGCAGTCAGCCACACAACGACTGGAACATGCATTC
AACATCGCCAGATATCAATTAGGCATAGAGAAACTACTCGATCCTGAAGATGTTGATACCACCTATCCAGATAAG
AAGTCCATCTTAATGTACATCACATCACTCTTCCAAGTTTTGCCTCAACAAGTGAGCATTGAAGCCATCCAGGAA
GTGGAAATGTTGCCAAGGCCACCTAAAGTGACTAAAGAAGAACATTTTCAGTTACATCATCAAATGCACTATTCT
CAACAGATCACGGTCAGTCTAGCACAGGGATATGAGAGAACTTCTTCCCCTAAGCCTCGATTCAAGAGCTATGCC
TACACACAGGCTGCTTATGTCACCACCTCTGACCCTACACGGAGCCCATTTCCTTCACAGCATTTGGAAGCTCCT
GAAGACAAGTCATTTGGCAGTTCATTGATGGAGAGTGAAGTAAACCTGGACCGTTATCAAACAGCTTTAGAAGAA
GTATTATCGTGGCTTCTTTCTGCTGAGGACACATTGCAAGCACAAGGAGAGATTTCTAATGATGTGGAAGTGGTG
AAAGACCAGTTTCATACTCATGAGGGGTACATGATGGATTTGACAGCCCATCAGGGCCGGGTTGGTAATATTCTA
CAATTGGGAAGTAAGCTGATTGGAACAGGAAAATTATCAGAAGATGAAGAAACTGAAGTACAAGAGCAGATGAAT
CTCCTAAATTCAAGATGGGAATGCCTCAGGGTAGCTAGCATGGAAAAACAAAGCAATTTACATAGAGTTTTAATG
GATAGATCTGTTGAGAAATGGCGGCGTTTTCATTATGATATAAAGATATTTAATCAGTGGCTAACAGAAGCTGAA
CAGTTTCTCAGAAAGACACAAATTCCTGAGAATTGGGAACATGCTAAATACAAATGGTATCTTAAGGAACTCCAG
GATGGCATTGGGCAGCGGCAAACTGTTGTCAGAACATTGAATGCAACTGGGGAAGAAATAATTCAGCAATCCTCA
AAAACAGATGCCAGTATTCTACAGGAAAAATTGGGAAGCCTGAATCTGCGGTGGCAGGAGGTCTGCAAACAGCTG
TCAGACAGAAAAAAGAGGCTAGAAGAACAAAAGAATATCTTGTCAGAATTTCAAAGAGATTTAAATGAATTTGTT
TTATGGTTGGAGGAAGCAGATAACATTGCTAGTATCCCACTTGAACCTGGAAAAGAGCAGCAACTAAAAGAAAAG
CTTGAGCAAGTCAAGTTACTGGTGGAAGAGTTGCCCCTGCGCCAGGGAATTCTCAAACAATTAAATGAAACTGGA
GGACCCGTGCTTGTAAGTGCTCCCATAAGCCCAGAAGAGCAAGATAAACTTGAAAATAAGCTCAAGCAGACAAAT
CTCCAGTGGATAAAGGTTTCCAGAGCTTTACCTGAGAAACAAGGAGAAATTGAAGCTCAAATAAAAGACCTTGGG
CAGCTTGAAAAAAAGCTTGAAGACCTTGAAGAGCAGTTAAATCATCTGCTGCTGTGGTTATCTCCTATTAGGAAT
CAGTTGGAAATTTATAACCAACCAAACCAAGAAGGACCATTTGACGTTAAGGAAACTGAAATAGCAGTTCAAGCT
AAACAACCGGATGTGGAAGAGATTTTGTCTAAAGGGCAGCATTTGTACAAGGAAAAACCAGCCACTCAGCCAGTG
AAGAGGAAGTTAGAAGATCTGAGCTCTGAGTGGAAGGCGGTAAACCGTTTACTTCAAGAGCTGAGGGCAAAGCAG
GGTCCAGCATCTCAGCACTTTCTTTCCACGTCTGTCCAGGGTCCCTGGGAGAGAGCCATCTCGCCAAACAAAGTG
CCCTACTATATCAACCACGAGACTCAAACAACTTGCTGGGACCATCCCAAAATGACAGAGCTCTACCAGTCTTTA
GCTGACCTGAATAATGTCAGATTCTCAGCTTATAGGACTGCCATGAAACTCCGAAGACTGCAGAAGGCCCTTTGC
TTGGATCTCTTGAGCCTGTCAGCTGCATGTGATGCCTTGGACCAGCACAACCTCAAGCAAAATGACCAGCCCATG
GATATCCTGCAGATTATTAATTGTTTGACCACTATTTATGACCGCCTGGAGCAAGAGCACAACAATTTGGTCAAC
GTCCCTCTCTGCGTGGATATGTGTCTGAACTGGCTGCTGAATGTTTATGATACGGGACGAACAGGGAGGATCCGT
GTCCTGTCTTTTAAAACTGGCATCATTTCCCTGTGTAAAGCACATTTGGAAGACAAGTACAGATACCTTTTCAAG
CAAGTGGCAAGTTCAACAGGATTTTGTGACCAGCGCAGGCTGGGCCTCCTTCTGCATGATTCTATCCAAATTCCA
AGACAGTTGGGTGAAGTTGCATCCTTTGGGGGCAGTAACATTGAGCCAAGTGTCCGGAGCTGCTTCCAATTTGCT
AATAATAAGCCAGAGATCGAAGCGGCCCTCTTCCTAGACTGGATGAGACTGGAACCCCAGTCCATGGTGTGGCTG
CCCGTCCTGCACAGAGTGGCTGCTGCAGAAACTGCCAAGCATCAGGCCAAATGTAACATCTGCAAAGAGTGTCCA
ATCATTGGATTCAGGTACAGGAGTCTAAAGCACTTTAATTATGACATCTGCCAAAGCTGCTTTTTTTCTGGTCGA
GTTGCAAAAGGCCATAAAATGCACTATCCCATGGTGGAATATTGCACTCCGACTACATCAGGAGAAGATGTTCGA
GACTTTGCCAAGGTACTAAAAAACAAATTTCGAACCAAAAGGTATTTTGCGAAGCATCCCCGAATGGGCTACCTG
CCAGTGCAGACTGTCTTAGAGGGGGACAACATGGAAACTCCCGTTACTCTGATCAACTTCTGGCCAGTAGATTCT
GCGCCTGCCTCGTCCCCTCAGCTTTCACACGATGATACTCATTCACGCATTGAACATTATGCTAGCAGGCTAGCA
GAAATGGAAAACAGCAATGGATCTTATCTAAATGATAGCATCTCTCCTAATGAGAGCATAGATGATGAACATTTG
TTAATCCAGCATTACTGCCAAAGTTTGAACCAGGACTCCCCCCTGAGCCAGCCTCGTAGT
Nterm-R1_R17-R19_R24 to 1st coiled coil and proline rich
region that follows:
(SEQ ID NO: 10)
ATGCTTTGGTGGGAAGAAGTAGAGGACTGTTATGAAAGAGAAGATGTTCAAAAGAAAACATTCACAAAATGGGTA
AATGCACAATTTTCTAAGTTTGGGAAGCAGCATATTGAGAACCTCTTCAGTGACCTACAGGATGGGAGGCGCCTC
CTAGACCTCCTCGAAGGCCTGACAGGGCAAAAACTGCCAAAAGAAAAAGGATCCACAAGAGTTCATGCCCTGAAC
AATGTCAACAAGGCACTGCGGGTTTTGCAGAACAATAATGTTGATTTAGTGAATATTGGAAGTACTGACATCGTA
GATGGAAATCATAAACTGACTCTTGGTTTGATTTGGAATATAATCCTCCACTGGCAGGTCAAAAATGTAATGAAA
AATATCATGGCTGGATTGCAACAAACCAACAGTGAAAAGATTCTCCTGAGCTGGGTCCGACAATCAACTCGTAAT
TATCCACAGGTTAATGTAATCAACTTCACCACCAGCTGGTCTGATGGCCTGGCTTTGAATGCTCTCATCCATAGT
CATAGGCCAGACCTATTTGACTGGAATAGTGTGGTTTGCCAGCAGTCAGCCACACAACGACTGGAACATGCATTC
AACATCGCCAGATATCAATTAGGCATAGAGAAACTACTCGATCCTGAAGATGTTGATACCACCTATCCAGATAAG
AAGTCCATCTTAATGTACATCACATCACTCTTCCAAGTTTTGCCTCAACAAGTGAGCATTGAAGCCATCCAGGAA
GTGGAAATGTTGCCAAGGCCACCTAAAGTGACTAAAGAAGAACATTTTCAGTTACATCATCAAATGCACTATTCT
CAACAGATCACGGTCAGTCTAGCACAGGGATATGAGAGAACTTCTTCCCCTAAGCCTCGATTCAAGAGCTATGCC
TACACACAGGCTGCTTATGTCACCACCTCTGACCCTACACGGAGCCCATTTCCTTCACAGCATTTGGAAGCTCCT
GAAGACAAGTCATTTGGCAGTTCATTGATGGAGAGTGAAGTAAACCTGGACCGTTATCAAACAGCTTTAGAAGAA
GTATTATCGTGGCTTCTTTCTGCTGAGGACACATTGCAAGCACAAGGAGAGATTTCTAATGATGTGGAAGTGGTG
AAAGACCAGTTTCATACTCATGAGGGGTACATGATGGATTTGACAGCCCATCAGGGCCGGGTTGGTAATATTCTA
CAATTGGGAAGTAAGCTGATTGGAACAGGAAAATTATCAGAAGATGAAGAAACTGAAGTACAAGAGCAGATGAAT
CTCCTAAATTCAAGATGGGAATGCCTCAGGGTAGCTAGCATGGAAAAACAAAGCAATTTACATAGAGTTTTAATG
GATCGATTTGACAGATCTGTTGAGAAATGGCGGCGTTTTCATTATGATATAAAGATATTTAATCAGTGGCTAACA
GAAGCTGAACAGTTTCTCAGAAAGACACAAATTCCTGAGAATTGGGAACATGCTAAATACAAATGGTATCTTAAG
GAACTCCAGGATGGCATTGGGCAGCGGCAAACTGTTGTCAGAACATTGAATGCAACTGGGGAAGAAATAATTCAG
CAATCCTCAAAAACAGATGCCAGTATTCTACAGGAAAAATTGGGAAGCCTGAATCTGCGGTGGCAGGAGGTCTGC
AAACAGCTGTCAGACAGAAAAAAGAGGCTAGAAGAACAAAAGAATATCTTGTCAGAATTTCAAAGAGATTTAAAT
GAATTTGTTTTATGGTTGGAGGAAGCAGATAACATTGCTAGTATCCCACTTGAACCTGGAAAAGAGCAGCAACTA
AAAGAAAAGCTTGAGCAAGTCAAGTTACTGGTGGAAGAGTTGCCCCTGCGCCAGGGAATTCTCAAACAATTAAAT
GAAACTGGAGGACCCGTGCTTGTAAGTGCTCCCATAAGCCCAGAAGAGCAAGATAAACTTGAAAATAAGCTCAAG
CAGACAAATCTCCAGTGGATAAAGGTTTCCAGAGCTTTACCTGAGAAACAAGGAGAAATTGAAGCTCAAATAAAA
GACCTTGGGCAGCTTGAAAAAAAGCTTGAAGACCTTGAAGAGCAGTTAAATCATCTGCTGCTGTGGTTATCTCCT
ATTAGGAATCAGTTGGAAATTTATAACCAACCAAACCAAGAAGGACCATTTGACGTTAAGGAAACTGAAATAGCA
GTTCAAGCTAAACAACCGGATGTGGAAGAGATTTTGTCTAAAGGGCAGCATTTGTACAAGGAAAAACCAGCCACT
CAGCCAGTGAAGAGGAAGTTAGAAGATCTGAGCTCTGAGTGGAAGGCGGTAAACCGTTTACTTCAAGAGCTGAGG
GCAAAGCAGTGGCAGAGAAAAATAGATGAGACCCTTGAAAGACTCCGGGAACTTCAAGAGGCCACGGATGAGCTG
GACCTCAAGCTGCGCCAAGCTGAGGTGATCAAGGGATCCTGGCAGCCCGTGGGCGATCTCCTCATTGACTCTCTC
CAAGATCACCTCGAGAAAGTCAAGGCACTTCGAGGAGAAATTGCGCCTCTGAAAGAGAACGTGAGCCACGTCAAT
GACCTTGCTCGCCAGCTTACCACTTTGGGCATTCAGCTCTCACCGTATAACCTCAGCACTCTGGAAGACCTGAAC
ACCAGATGGAAGCTTCTGCAGGTGGCCGTCGAGGACCGAGTCAGGCAGCTGCATGAAGCCCACAGGGACTTTGGT
CCAGCATCTCAGCACTTTCTTTCCACGTCTGTCCAGGGTCCCTGGGAGAGAGCCATCTCGCCAAACAAAGTGCCC
TACTATATCAACCACGAGACTCAAACAACTTGCTGGGACCATCCCAAAATGACAGAGCTCTACCAGTCTTTAGCT
GACCTGAATAATGTCAGATTCTCAGCTTATAGGACTGCCATGAAACTCCGAAGACTGCAGAAGGCCCTTTGCTTG
GATCTCTTGAGCCTGTCAGCTGCATGTGATGCCTTGGACCAGCACAACCTCAAGCAAAATGACCAGCCCATGGAT
ATCCTGCAGATTATTAATTGTTTGACCACTATTTATGACCGCCTGGAGCAAGAGCACAACAATTTGGTCAACGTC
CCTCTCTGCGTGGATATGTGTCTGAACTGGCTGCTGAATGTTTATGATACGGGACGAACAGGGAGGATCCGTGTC
CTGTCTTTTAAAACTGGCATCATTTCCCTGTGTAAAGCACATTTGGAAGACAAGTACAGATACCTTTTCAAGCAA
GTGGCAAGTTCAACAGGATTTTGTGACCAGCGCAGGCTGGGCCTCCTTCTGCATGATTCTATCCAAATTCCAAGA
CAGTTGGGTGAAGTTGCATCCTTTGGGGGCAGTAACATTGAGCCAAGTGTCCGGAGCTGCTTCCAATTTGCTAAT
AATAAGCCAGAGATCGAAGCGGCCCTCTTCCTAGACTGGATGAGACTGGAACCCCAGTCCATGGTGTGGCTGCCC
GTCCTGCACAGAGTGGCTGCTGCAGAAACTGCCAAGCATCAGGCCAAATGTAACATCTGCAAAGAGTGTCCAATC
ATTGGATTCAGGTACAGGAGTCTAAAGCACTTTAATTATGACATCTGCCAAAGCTGCTTTTTTTCTGGTCGAGTT
GCAAAAGGCCATAAAATGCACTATCCCATGGTGGAATATTGCACTCCGACTACATCAGGAGAAGATGTTCGAGAC
TTTGCCAAGGTACTAAAAAACAAATTTCGAACCAAAAGGTATTTTGCGAAGCATCCCCGAATGGGCTACCTGCCA
GTGCAGACTGTCTTAGAGGGGGACAACATGGAAACTCCCGTTACTCTGATCAACTTCTGGCCAGTAGATTCTGCG
CCTGCCTCGTCCCCTCAGCTTTCACACGATGATACTCATTCACGCATTGAACATTATGCTAGCAGGCTAGCAGAA
ATGGAAAACAGCAATGGATCTTATCTAAATGATAGCATCTCTCCTAATGAGAGCATAGATGATGAACATTTGTTA
ATCCAGCATTACTGCCAAAGTTTGAACCAGGACTCCCCCCTGAGCCAGCCTCGTAGTCCTGCCCAGATCTTGATT
TCCTTAGAGAGTGAGGAAAGAGGGGAGCTAGAGAGAATCCTAGCAGATCTTGAGGAAGAAAACAGGAATCTGCAA
GCAGAATATGACCGTCTAAAGCAGCAGCACGAACATAAAGGCCTGTCCCCACTGCCGTCCCCTCCTGAAATGATG
CCCACCTCTCCCCAGAGTCCC
Nterm-R1_R17-R19_R24 to 1st coiled coil and proline rich
region that follows:
(SEQ ID NO: 129)
ATGCTTTGGTGGGAAGAAGTAGAGGACTGTTATGAAAGAGAAGATGTTCAAAAGAAAACATTCACAAAATGGGTA
AATGCACAATTTTCTAAGTTTGGGAAGCAGCATATTGAGAACCTCTTCAGTGACCTACAGGATGGGAGGCGCCTC
CTAGACCTCCTCGAAGGCCTGACAGGGCAAAAACTGCCAAAAGAAAAAGGATCCACAAGAGTTCATGCCCTGAAC
AATGTCAACAAGGCACTGCGGGTTTTGCAGAACAATAATGTTGATTTAGTGAATATTGGAAGTACTGACATCGTA
GATGGAAATCATAAACTGACTCTTGGTTTGATTTGGAATATAATCCTCCACTGGCAGGTCAAAAATGTAATGAAA
AATATCATGGCTGGATTGCAACAAACCAACAGTGAAAAGATTCTCCTGAGCTGGGTCCGACAATCAACTCGTAAT
TATCCACAGGTTAATGTAATCAACTTCACCACCAGCTGGTCTGATGGCCTGGCTTTGAATGCTCTCATCCATAGT
CATAGGCCAGACCTATTTGACTGGAATAGTGTGGTTTGCCAGCAGTCAGCCACACAACGACTGGAACATGCATTC
AACATCGCCAGATATCAATTAGGCATAGAGAAACTACTCGATCCTGAAGATGTTGATACCACCTATCCAGATAAG
AAGTCCATCTTAATGTACATCACATCACTCTTCCAAGTTTTGCCTCAACAAGTGAGCATTGAAGCCATCCAGGAA
GTGGAAATGTTGCCAAGGCCACCTAAAGTGACTAAAGAAGAACATTTTCAGTTACATCATCAAATGCACTATTCT
CAACAGATCACGGTCAGTCTAGCACAGGGATATGAGAGAACTTCTTCCCCTAAGCCTCGATTCAAGAGCTATGCC
TACACACAGGCTGCTTATGTCACCACCTCTGACCCTACACGGAGCCCATTTCCTTCACAGCATTTGGAAGCTCCT
GAAGACAAGTCATTTGGCAGTTCATTGATGGAGAGTGAAGTAAACCTGGACCGTTATCAAACAGCTTTAGAAGAA
GTATTATCGTGGCTTCTTTCTGCTGAGGACACATTGCAAGCACAAGGAGAGATTTCTAATGATGTGGAAGTGGTG
AAAGACCAGTTTCATACTCATGAGGGGTACATGATGGATTTGACAGCCCATCAGGGCCGGGTTGGTAATATTCTA
CAATTGGGAAGTAAGCTGATTGGAACAGGAAAATTATCAGAAGATGAAGAAACTGAAGTACAAGAGCAGATGAAT
CTCCTAAATTCAAGATGGGAATGCCTCAGGGTAGCTAGCATGGAAAAACAAAGCAATTTACATAGAGTTTTAATG
GATAGATCTGTTGAGAAATGGCGGCGTTTTCATTATGATATAAAGATATTTAATCAGTGGCTAACAGAAGCTGAA
CAGTTTCTCAGAAAGACACAAATTCCTGAGAATTGGGAACATGCTAAATACAAATGGTATCTTAAGGAACTCCAG
GATGGCATTGGGCAGCGGCAAACTGTTGTCAGAACATTGAATGCAACTGGGGAAGAAATAATTCAGCAATCCTCA
AAAACAGATGCCAGTATTCTACAGGAAAAATTGGGAAGCCTGAATCTGCGGTGGCAGGAGGTCTGCAAACAGCTG
TCAGACAGAAAAAAGAGGCTAGAAGAACAAAAGAATATCTTGTCAGAATTTCAAAGAGATTTAAATGAATTTGTT
TTATGGTTGGAGGAAGCAGATAACATTGCTAGTATCCCACTTGAACCTGGAAAAGAGCAGCAACTAAAAGAAAAG
CTTGAGCAAGTCAAGTTACTGGTGGAAGAGTTGCCCCTGCGCCAGGGAATTCTCAAACAATTAAATGAAACTGGA
GGACCCGTGCTTGTAAGTGCTCCCATAAGCCCAGAAGAGCAAGATAAACTTGAAAATAAGCTCAAGCAGACAAAT
CTCCAGTGGATAAAGGTTTCCAGAGCTTTACCTGAGAAACAAGGAGAAATTGAAGCTCAAATAAAAGACCTTGGG
CAGCTTGAAAAAAAGCTTGAAGACCTTGAAGAGCAGTTAAATCATCTGCTGCTGTGGTTATCTCCTATTAGGAAT
CAGTTGGAAATTTATAACCAACCAAACCAAGAAGGACCATTTGACGTTAAGGAAACTGAAATAGCAGTTCAAGCT
AAACAACCGGATGTGGAAGAGATTTTGTCTAAAGGGCAGCATTTGTACAAGGAAAAACCAGCCACTCAGCCAGTG
AAGAGGAAGTTAGAAGATCTGAGCTCTGAGTGGAAGGCGGTAAACCGTTTACTTCAAGAGCTGAGGGCAAAGCAG
TGGCAGAGAAAAATAGATGAGACCCTTGAAAGACTCCGGGAACTTCAAGAGGCCACGGATGAGCTGGACCTCAAG
CTGCGCCAAGCTGAGGTGATCAAGGGATCCTGGCAGCCCGTGGGCGATCTCCTCATTGACTCTCTCCAAGATCAC
CTCGAGAAAGTCAAGGCACTTCGAGGAGAAATTGCGCCTCTGAAAGAGAACGTGAGCCACGTCAATGACCTTGCT
CGCCAGCTTACCACTTTGGGCATTCAGCTCTCACCGTATAACCTCAGCACTCTGGAAGACCTGAACACCAGATGG
AAGCTTCTGCAGGTGGCCGTCGAGGACCGAGTCAGGCAGCTGCATGAAGCCCACAGGGACTTTGGTCCAGCATCT
CAGCACTTTCTTTCCACGTCTGTCCAGGGTCCCTGGGAGAGAGCCATCTCGCCAAACAAAGTGCCCTACTATATC
AACCACGAGACTCAAACAACTTGCTGGGACCATCCCAAAATGACAGAGCTCTACCAGTCTTTAGCTGACCTGAAT
AATGTCAGATTCTCAGCTTATAGGACTGCCATGAAACTCCGAAGACTGCAGAAGGCCCTTTGCTTGGATCTCTTG
AGCCTGTCAGCTGCATGTGATGCCTTGGACCAGCACAACCTCAAGCAAAATGACCAGCCCATGGATATCCTGCAG
ATTATTAATTGTTTGACCACTATTTATGACCGCCTGGAGCAAGAGCACAACAATTTGGTCAACGTCCCTCTCTGC
GTGGATATGTGTCTGAACTGGCTGCTGAATGTTTATGATACGGGACGAACAGGGAGGATCCGTGTCCTGTCTTTT
AAAACTGGCATCATTTCCCTGTGTAAAGCACATTTGGAAGACAAGTACAGATACCTTTTCAAGCAAGTGGCAAGT
TCAACAGGATTTTGTGACCAGCGCAGGCTGGGCCTCCTTCTGCATGATTCTATCCAAATTCCAAGACAGTTGGGT
GAAGTTGCATCCTTTGGGGGCAGTAACATTGAGCCAAGTGTCCGGAGCTGCTTCCAATTTGCTAATAATAAGCCA
GAGATCGAAGCGGCCCTCTTCCTAGACTGGATGAGACTGGAACCCCAGTCCATGGTGTGGCTGCCCGTCCTGCAC
AGAGTGGCTGCTGCAGAAACTGCCAAGCATCAGGCCAAATGTAACATCTGCAAAGAGTGTCCAATCATTGGATTC
AGGTACAGGAGTCTAAAGCACTTTAATTATGACATCTGCCAAAGCTGCTTTTTTTCTGGTCGAGTTGCAAAAGGC
CATAAAATGCACTATCCCATGGTGGAATATTGCACTCCGACTACATCAGGAGAAGATGTTCGAGACTTTGCCAAG
GTACTAAAAAACAAATTTCGAACCAAAAGGTATTTTGCGAAGCATCCCCGAATGGGCTACCTGCCAGTGCAGACT
GTCTTAGAGGGGGACAACATGGAAACTCCCGTTACTCTGATCAACTTCTGGCCAGTAGATTCTGCGCCTGCCTCG
TCCCCTCAGCTTTCACACGATGATACTCATTCACGCATTGAACATTATGCTAGCAGGCTAGCAGAAATGGAAAAC
AGCAATGGATCTTATCTAAATGATAGCATCTCTCCTAATGAGAGCATAGATGATGAACATTTGTTAATCCAGCAT
TACTGCCAAAGTTTGAACCAGGACTCCCCCCTGAGCCAGCCTCGTAGTCCTGCCCAGATCTTGATTTCCTTAGAG
AGTGAGGAAAGAGGGGAGCTAGAGAGAATCCTAGCAGATCTTGAGGAAGAAAACAGGAATCTGCAAGCAGAATAT
GACCGTCTAAAGCAGCAGCACGAACATAAAGGCCTGTCCCCACTGCCGTCCCCTCCTGAAATGATGCCCACCTCT
CCCCAGAGTCCC
Nterm-R1_R17-R19_H4 to end of dystrophin:
(SEQ ID NO: 11)
ATGCTTTGGTGGGAAGAAGTAGAGGACTGTTATGAAAGAGAAGATGTTCAAAAGAAAACATTCACAAAATGGGTA
AATGCACAATTTTCTAAGTTTGGGAAGCAGCATATTGAGAACCTCTTCAGTGACCTACAGGATGGGAGGCGCCTC
CTAGACCTCCTCGAAGGCCTGACAGGGCAAAAACTGCCAAAAGAAAAAGGATCCACAAGAGTTCATGCCCTGAAC
AATGTCAACAAGGCACTGCGGGTTTTGCAGAACAATAATGTTGATTTAGTGAATATTGGAAGTACTGACATCGTA
GATGGAAATCATAAACTGACTCTTGGTTTGATTTGGAATATAATCCTCCACTGGCAGGTCAAAAATGTAATGAAA
AATATCATGGCTGGATTGCAACAAACCAACAGTGAAAAGATTCTCCTGAGCTGGGTCCGACAATCAACTCGTAAT
TATCCACAGGTTAATGTAATCAACTTCACCACCAGCTGGTCTGATGGCCTGGCTTTGAATGCTCTCATCCATAGT
CATAGGCCAGACCTATTTGACTGGAATAGTGTGGTTTGCCAGCAGTCAGCCACACAACGACTGGAACATGCATTC
AACATCGCCAGATATCAATTAGGCATAGAGAAACTACTCGATCCTGAAGATGTTGATACCACCTATCCAGATAAG
AAGTCCATCTTAATGTACATCACATCACTCTTCCAAGTTTTGCCTCAACAAGTGAGCATTGAAGCCATCCAGGAA
GTGGAAATGTTGCCAAGGCCACCTAAAGTGACTAAAGAAGAACATTTTCAGTTACATCATCAAATGCACTATTCT
CAACAGATCACGGTCAGTCTAGCACAGGGATATGAGAGAACTTCTTCCCCTAAGCCTCGATTCAAGAGCTATGCC
TACACACAGGCTGCTTATGTCACCACCTCTGACCCTACACGGAGCCCATTTCCTTCACAGCATTTGGAAGCTCCT
GAAGACAAGTCATTTGGCAGTTCATTGATGGAGAGTGAAGTAAACCTGGACCGTTATCAAACAGCTTTAGAAGAA
GTATTATCGTGGCTTCTTTCTGCTGAGGACACATTGCAAGCACAAGGAGAGATTTCTAATGATGTGGAAGTGGTG
AAAGACCAGTTTCATACTCATGAGGGGTACATGATGGATTTGACAGCCCATCAGGGCCGGGTTGGTAATATTCTA
CAATTGGGAAGTAAGCTGATTGGAACAGGAAAATTATCAGAAGATGAAGAAACTGAAGTACAAGAGCAGATGAAT
CTCCTAAATTCAAGATGGGAATGCCTCAGGGTAGCTAGCATGGAAAAACAAAGCAATTTACATAGAGTTTTAATG
GATCGATTTGACAGATCTGTTGAGAAATGGCGGCGTTTTCATTATGATATAAAGATATTTAATCAGTGGCTAACA
GAAGCTGAACAGTTTCTCAGAAAGACACAAATTCCTGAGAATTGGGAACATGCTAAATACAAATGGTATCTTAAG
GAACTCCAGGATGGCATTGGGCAGCGGCAAACTGTTGTCAGAACATTGAATGCAACTGGGGAAGAAATAATTCAG
CAATCCTCAAAAACAGATGCCAGTATTCTACAGGAAAAATTGGGAAGCCTGAATCTGCGGTGGCAGGAGGTCTGC
AAACAGCTGTCAGACAGAAAAAAGAGGCTAGAAGAACAAAAGAATATCTTGTCAGAATTTCAAAGAGATTTAAAT
GAATTTGTTTTATGGTTGGAGGAAGCAGATAACATTGCTAGTATCCCACTTGAACCTGGAAAAGAGCAGCAACTA
AAAGAAAAGCTTGAGCAAGTCAAGTTACTGGTGGAAGAGTTGCCCCTGCGCCAGGGAATTCTCAAACAATTAAAT
GAAACTGGAGGACCCGTGCTTGTAAGTGCTCCCATAAGCCCAGAAGAGCAAGATAAACTTGAAAATAAGCTCAAG
CAGACAAATCTCCAGTGGATAAAGGTTTCCAGAGCTTTACCTGAGAAACAAGGAGAAATTGAAGCTCAAATAAAA
GACCTTGGGCAGCTTGAAAAAAAGCTTGAAGACCTTGAAGAGCAGTTAAATCATCTGCTGCTGTGGTTATCTCCT
ATTAGGAATCAGTTGGAAATTTATAACCAACCAAACCAAGAAGGACCATTTGACGTTAAGGAAACTGAAATAGCA
GTTCAAGCTAAACAACCGGATGTGGAAGAGATTTTGTCTAAAGGGCAGCATTTGTACAAGGAAAAACCAGCCACT
CAGCCAGTGAAGAGGAAGTTAGAAGATCTGAGCTCTGAGTGGAAGGCGGTAAACCGTTTACTTCAAGAGCTGAGG
GCAAAGCAGGGTCCAGCATCTCAGCACTTTCTTTCCACGTCTGTCCAGGGTCCCTGGGAGAGAGCCATCTCGCCA
AACAAAGTGCCCTACTATATCAACCACGAGACTCAAACAACTTGCTGGGACCATCCCAAAATGACAGAGCTCTAC
CAGTCTTTAGCTGACCTGAATAATGTCAGATTCTCAGCTTATAGGACTGCCATGAAACTCCGAAGACTGCAGAAG
GCCCTTTGCTTGGATCTCTTGAGCCTGTCAGCTGCATGTGATGCCTTGGACCAGCACAACCTCAAGCAAAATGAC
CAGCCCATGGATATCCTGCAGATTATTAATTGTTTGACCACTATTTATGACCGCCTGGAGCAAGAGCACAACAAT
TTGGTCAACGTCCCTCTCTGCGTGGATATGTGTCTGAACTGGCTGCTGAATGTTTATGATACGGGACGAACAGGG
AGGATCCGTGTCCTGTCTTTTAAAACTGGCATCATTTCCCTGTGTAAAGCACATTTGGAAGACAAGTACAGATAC
CTTTTCAAGCAAGTGGCAAGTTCAACAGGATTTTGTGACCAGCGCAGGCTGGGCCTCCTTCTGCATGATTCTATC
CAAATTCCAAGACAGTTGGGTGAAGTTGCATCCTTTGGGGGCAGTAACATTGAGCCAAGTGTCCGGAGCTGCTTC
CAATTTGCTAATAATAAGCCAGAGATCGAAGCGGCCCTCTTCCTAGACTGGATGAGACTGGAACCCCAGTCCATG
GTGTGGCTGCCCGTCCTGCACAGAGTGGCTGCTGCAGAAACTGCCAAGCATCAGGCCAAATGTAACATCTGCAAA
GAGTGTCCAATCATTGGATTCAGGTACAGGAGTCTAAAGCACTTTAATTATGACATCTGCCAAAGCTGCTTTTTT
TCTGGTCGAGTTGCAAAAGGCCATAAAATGCACTATCCCATGGTGGAATATTGCACTCCGACTACATCAGGAGAA
GATGTTCGAGACTTTGCCAAGGTACTAAAAAACAAATTTCGAACCAAAAGGTATTTTGCGAAGCATCCCCGAATG
GGCTACCTGCCAGTGCAGACTGTCTTAGAGGGGGACAACATGGAAACTCCCGTTACTCTGATCAACTTCTGGCCA
GTAGATTCTGCGCCTGCCTCGTCCCCTCAGCTTTCACACGATGATACTCATTCACGCATTGAACATTATGCTAGC
AGGCTAGCAGAAATGGAAAACAGCAATGGATCTTATCTAAATGATAGCATCTCTCCTAATGAGAGCATAGATGAT
GAACATTTGTTAATCCAGCATTACTGCCAAAGTTTGAACCAGGACTCCCCCCTGAGCCAGCCTCGTAGTCCTGCC
CAGATCTTGATTTCCTTAGAGAGTGAGGAAAGAGGGGAGCTAGAGAGAATCCTAGCAGATCTTGAGGAAGAAAAC
AGGAATCTGCAAGCAGAATATGACCGTCTAAAGCAGCAGCACGAACATAAAGGCCTGTCCCCACTGCCGTCCCCT
CCTGAAATGATGCCCACCTCTCCCCAGAGTCCCCGGGATGCTGAGCTCATTGCTGAGGCCAAGCTACTGCGTCAA
CACAAAGGCCGCCTGGAAGCCAGGATGCAAATCCTGGAAGACCACAATAAACAGCTGGAGTCACAGTTACACAGG
CTAAGGCAGCTGCTGGAGCAACCCCAGGCAGAGGCCAAAGTGAATGGCACAACGGTGTCCTCTCCTTCTACCTCT
CTACAGAGGTCCGACAGCAGTCAGCCTATGCTGCTCCGAGTGGTTGGCAGTCAAACTTCGGACTCCATGGGTGAG
GAAGATCTTCTCAGTCCTCCCCAGGACACAAGCACAGGGTTAGAGGAGGTGATGGAGCAACTCAACAACTCCTTC
CCTAGTTCAAGAGGAAGAAATACCCCTGGAAAGCCAATGAGAGAGGACACAATG
Nterm-R1_R17-R19_H4 to end of dystrophin:
(SEQ ID NO: 130)
ATGCTTTGGTGGGAAGAAGTAGAGGACTGTTATGAAAGAGAAGATGTTCAAAAGAAAACATTCACAAAATGGGTA
AATGCACAATTTTCTAAGTTTGGGAAGCAGCATATTGAGAACCTCTTCAGTGACCTACAGGATGGGAGGCGCCTC
CTAGACCTCCTCGAAGGCCTGACAGGGCAAAAACTGCCAAAAGAAAAAGGATCCACAAGAGTTCATGCCCTGAAC
AATGTCAACAAGGCACTGCGGGTTTTGCAGAACAATAATGTTGATTTAGTGAATATTGGAAGTACTGACATCGTA
GATGGAAATCATAAACTGACTCTTGGTTTGATTTGGAATATAATCCTCCACTGGCAGGTCAAAAATGTAATGAAA
AATATCATGGCTGGATTGCAACAAACCAACAGTGAAAAGATTCTCCTGAGCTGGGTCCGACAATCAACTCGTAAT
TATCCACAGGTTAATGTAATCAACTTCACCACCAGCTGGTCTGATGGCCTGGCTTTGAATGCTCTCATCCATAGT
CATAGGCCAGACCTATTTGACTGGAATAGTGTGGTTTGCCAGCAGTCAGCCACACAACGACTGGAACATGCATTC
AACATCGCCAGATATCAATTAGGCATAGAGAAACTACTCGATCCTGAAGATGTTGATACCACCTATCCAGATAAG
AAGTCCATCTTAATGTACATCACATCACTCTTCCAAGTTTTGCCTCAACAAGTGAGCATTGAAGCCATCCAGGAA
GTGGAAATGTTGCCAAGGCCACCTAAAGTGACTAAAGAAGAACATTTTCAGITACATCATCAAATGCACTATTCT
CAACAGATCACGGTCAGTCTAGCACAGGGATATGAGAGAACTTCTTCCCCTAAGCCTCGATTCAAGAGCTATGCC
TACACACAGGCTGCTTATGTCACCACCTCTGACCCTACACGGAGCCCATTTCCTTCACAGCATTTGGAAGCTCCT
GAAGACAAGTCATTTGGCAGTTCATTGATGGAGAGTGAAGTAAACCTGGACCGTTATCAAACAGCTTTAGAAGAA
GTATTATCGTGGCTTCTTTCTGCTGAGGACACATTGCAAGCACAAGGAGAGATTTCTAATGATGTGGAAGTGGTG
AAAGACCAGTTTCATACTCATGAGGGGTACATGATGGATTTGACAGCCCATCAGGGCCGGGTTGGTAATATTCTA
CAATTGGGAAGTAAGCTGATTGGAACAGGAAAATTATCAGAAGATGAAGAAACTGAAGTACAAGAGCAGATGAAT
CTCCTAAATTCAAGATGGGAATGCCTCAGGGTAGCTAGCATGGAAAAACAAAGCAATTTACATAGAGTTTTAATG
GATAGATCTGTTGAGAAATGGCGGCGTTTTCATTATGATATAAAGATATTTAATCAGTGGCTAACAGAAGCTGAA
CAGTTTCTCAGAAAGACACAAATTCCTGAGAATTGGGAACATGCTAAATACAAATGGTATCTTAAGGAACTCCAG
GATGGCATTGGGCAGCGGCAAACTGTTGTCAGAACATTGAATGCAACTGGGGAAGAAATAATTCAGCAATCCTCA
AAAACAGATGCCAGTATTCTACAGGAAAAATTGGGAAGCCTGAATCTGCGGTGGCAGGAGGTCTGCAAACAGCTG
TCAGACAGAAAAAAGAGGCTAGAAGAACAAAAGAATATCTTGTCAGAATTTCAAAGAGATTTAAATGAATTTGTT
TTATGGTTGGAGGAAGCAGATAACATTGCTAGTATCCCACTTGAACCTGGAAAAGAGCAGCAACTAAAAGAAAAG
CTTGAGCAAGTCAAGTTACTGGTGGAAGAGTTGCCCCTGCGCCAGGGAATTCTCAAACAATTAAATGAAACTGGA
GGACCCGTGCTTGTAAGTGCTCCCATAAGCCCAGAAGAGCAAGATAAACTTGAAAATAAGCTCAAGCAGACAAAT
CTCCAGTGGATAAAGGTTTCCAGAGCTTTACCTGAGAAACAAGGAGAAATTGAAGCTCAAATAAAAGACCTTGGG
CAGCTTGAAAAAAAGCTTGAAGACCTTGAAGAGCAGTTAAATCATCTGCTGCTGTGGTTATCTCCTATTAGGAAT
CAGTTGGAAATTTATAACCAACCAAACCAAGAAGGACCATTIGACGTTAAGGAAACTGAAATAGCAGTTCAAGCT
AAACAACCGGATGTGGAAGAGATTTTGTCTAAAGGGCAGCATTTGTACAAGGAAAAACCAGCCACTCAGCCAGTG
AAGAGGAAGTTAGAAGATCTGAGCTCTGAGTGGAAGGCGGTAAACCGTTTACTTCAAGAGCTGAGGGCAAAGCAG
GGTCCAGCATCTCAGCACTTTCTTTCCACGTCTGTCCAGGGTCCCTGGGAGAGAGCCATCTCGCCAAACAAAGTG
CCCTACTATATCAACCACGAGACTCAAACAACTTGCTGGGACCATCCCAAAATGACAGAGCTCTACCAGTCTTTA
GCTGACCTGAATAATGTCAGATTCTCAGCTTATAGGACTGCCATGAAACTCCGAAGACTGCAGAAGGCCCTTTGC
TTGGATCTCTTGAGCCTGTCAGCTGCATGTGATGCCTTGGACCAGCACAACCTCAAGCAAAATGACCAGCCCATG
GATATCCTGCAGATTATTAATTGTTTGACCACTATTTATGACCGCCTGGAGCAAGAGCACAACAATTTGGTCAAC
GTCCCTCTCTGCGTGGATATGTGTCTGAACTGGCTGCTGAATGTTTATGATACGGGACGAACAGGGAGGATCCGT
GTCCTGTCTTTTAAAACTGGCATCATTTCCCTGTGTAAAGCACATTTGGAAGACAAGTACAGATACCTTTTCAAG
CAAGTGGCAAGTTCAACAGGATTTTGTGACCAGCGCAGGCTGGGCCTCCTTCTGCATGATTCTATCCAAATTCCA
AGACAGTTGGGTGAAGTTGCATCCTTTGGGGGCAGTAACATTGAGCCAAGTGTCCGGAGCTGCTTCCAATTTGCT
AATAATAAGCCAGAGATCGAAGCGGCCCTCTTCCTAGACTGGATGAGACTGGAACCCCAGTCCATGGTGTGGCTG
CCCGTCCTGCACAGAGTGGCTGCTGCAGAAACTGCCAAGCATCAGGCCAAATGTAACATCTGCAAAGAGTGTCCA
ATCATTGGATTCAGGTACAGGAGTCTAAAGCACTTTAATTATGACATCTGCCAAAGCTGCTTTTTTTCTGGTCGA
GTTGCAAAAGGCCATAAAATGCACTATCCCATGGTGGAATATTGCACTCCGACTACATCAGGAGAAGATGTTCGA
GACTTTGCCAAGGTACTAAAAAACAAATTTCGAACCAAAAGGTATTTTGCGAAGCATCCCCGAATGGGCTACCTG
CCAGTGCAGACTGTCTTAGAGGGGGACAACATGGAAACTCCCGTTACTCTGATCAACTTCTGGCCAGTAGATTCT
GCGCCTGCCTCGTCCCCTCAGCTTTCACACGATGATACTCATTCACGCATTGAACATTATGCTAGCAGGCTAGCA
GAAATGGAAAACAGCAATGGATCTTATCTAAATGATAGCATCTCTCCTAATGAGAGCATAGATGATGAACATTTG
TTAATCCAGCATTACTGCCAAAGTTTGAACCAGGACTCCCCCCTGAGCCAGCCTCGTAGTCCTGCCCAGATCTTG
ATTTCCTTAGAGAGTGAGGAAAGAGGGGAGCTAGAGAGAATCCTAGCAGATCTTGAGGAAGAAAACAGGAATCTG
CAAGCAGAATATGACCGTCTAAAGCAGCAGCACGAACATAAAGGCCTGTCCCCACTGCCGTCCCCTCCTGAAATG
ATGCCCACCTCTCCCCAGAGTCCCCGGGATGCTGAGCTCATTGCTGAGGCCAAGCTACTGCGTCAACACAAAGGC
CGCCTGGAAGCCAGGATGCAAATCCTGGAAGACCACAATAAACAGCTGGAGTCACAGTTACACAGGCTAAGGCAG
CTGCTGGAGCAACCCCAGGCAGAGGCCAAAGTGAATGGCACAACGGTGTCCTCTCCTTCTACCTCTCTACAGAGG
TCCGACAGCAGTCAGCCTATGCTGCTCCGAGTGGTTGGCAGTCAAACTTCGGACTCCATGGGTGAGGAAGATCTT
CTCAGTCCTCCCCAGGACACAAGCACAGGGTTAGAGGAGGTGATGGAGCAACTCAACAACTCCTTCCCTAGTTCA
AGAGGAAGAAATACCCCTGGAAAGCCAATGAGAGAGGACACAATG
Nterm-R1_R17-R19_R24 to end of dystrophin:
(SEQ ID NO: 12)
ATGCTTTGGTGGGAAGAAGTAGAGGACTGTTATGAAAGAGAAGATGTTCAAAAGAAAACATTCACAAAATGGGTA
AATGCACAATTTTCTAAGTTTGGGAAGCAGCATATTGAGAACCTCTTCAGTGACCTACAGGATGGGAGGCGCCTC
CTAGACCTCCTCGAAGGCCTGACAGGGCAAAAACTGCCAAAAGAAAAAGGATCCACAAGAGTTCATGCCCTGAAC
AATGTCAACAAGGCACTGCGGGTTTTGCAGAACAATAATGTTGATTTAGTGAATATTGGAAGTACTGACATCGTA
GATGGAAATCATAAACTGACTCTTGGTTTGATTTGGAATATAATCCTCCACTGGCAGGTCAAAAATGTAATGAAA
AATATCATGGCTGGATTGCAACAAACCAACAGTGAAAAGATTCTCCTGAGCTGGGTCCGACAATCAACTCGTAAT
TATCCACAGGTTAATGTAATCAACTTCACCACCAGCTGGTCTGATGGCCTGGCTTTGAATGCTCTCATCCATAGT
CATAGGCCAGACCTATTTGACTGGAATAGTGTGGTTTGCCAGCAGTCAGCCACACAACGACTGGAACATGCATTC
AACATCGCCAGATATCAATTAGGCATAGAGAAACTACTCGATCCTGAAGATGTTGATACCACCTATCCAGATAAG
AAGTCCATCTTAATGTACATCACATCACTCTTCCAAGTTTTGCCTCAACAAGTGAGCATTGAAGCCATCCAGGAA
GTGGAAATGTTGCCAAGGCCACCTAAAGTGACTAAAGAAGAACATTTTCAGTTACATCATCAAATGCACTATTCT
CAACAGATCACGGTCAGTCTAGCACAGGGATATGAGAGAACTTCTTCCCCTAAGCCTCGATTCAAGAGCTATGCC
TACACACAGGCTGCTTATGTCACCACCTCTGACCCTACACGGAGCCCATTTCCTTCACAGCATTTGGAAGCTCCT
GAAGACAAGTCATTTGGCAGTTCATTGATGGAGAGTGAAGTAAACCTGGACCGTTATCAAACAGCTTTAGAAGAA
GTATTATCGTGGCTTCTTTCTGCTGAGGACACATTGCAAGCACAAGGAGAGATTTCTAATGATGTGGAAGTGGTG
AAAGACCAGTTTCATACTCATGAGGGGTACATGATGGATTTGACAGCCCATCAGGGCCGGGTTGGTAATATTCTA
CAATTGGGAAGTAAGCTGATTGGAACAGGAAAATTATCAGAAGATGAAGAAACTGAAGTACAAGAGCAGATGAAT
CTCCTAAATTCAAGATGGGAATGCCTCAGGGTAGCTAGCATGGAAAAACAAAGCAATTTACATAGAGTTTTAATG
GATCGATTTGACAGATCTGTTGAGAAATGGCGGCGTTTTCATTATGATATAAAGATATTTAATCAGTGGCTAACA
GAAGCTGAACAGTTTCTCAGAAAGACACAAATTCCTGAGAATTGGGAACATGCTAAATACAAATGGTATCTTAAG
GAACTCCAGGATGGCATTGGGCAGCGGCAAACTGTTGTCAGAACATTGAATGCAACTGGGGAAGAAATAATTCAG
CAATCCTCAAAAACAGATGCCAGTATTCTACAGGAAAAATTGGGAAGCCTGAATCTGCGGTGGCAGGAGGTCTGC
AAACAGCTGTCAGACAGAAAAAAGAGGCTAGAAGAACAAAAGAATATCTTGTCAGAATTTCAAAGAGATTTAAAT
GAATTTGTTTTATGGTTGGAGGAAGCAGATAACATTGCTAGTATCCCACTTGAACCTGGAAAAGAGCAGCAACTA
AAAGAAAAGCTTGAGCAAGTCAAGTTACTGGTGGAAGAGTTGCCCCTGCGCCAGGGAATTCTCAAACAATTAAAT
GAAACTGGAGGACCCGTGCTTGTAAGTGCTCCCATAAGCCCAGAAGAGCAAGATAAACTTGAAAATAAGCTCAAG
CAGACAAATCTCCAGTGGATAAAGGTTTCCAGAGCTTTACCTGAGAAACAAGGAGAAATTGAAGCTCAAATAAAA
GACCTTGGGCAGCTTGAAAAAAAGCTTGAAGACCTTGAAGAGCAGTTAAATCATCTGCTGCTGTGGTTATCTCCT
ATTAGGAATCAGTTGGAAATTTATAACCAACCAAACCAAGAAGGACCATTTGACGTTAAGGAAACTGAAATAGCA
GTTCAAGCTAAACAACCGGATGTGGAAGAGATTTTGTCTAAAGGGCAGCATTTGTACAAGGAAAAACCAGCCACT
CAGCCAGTGAAGAGGAAGTTAGAAGATCTGAGCTCTGAGTGGAAGGCGGTAAACCGTTTACTTCAAGAGCTGAGG
GCAAAGCAGTGGCAGAGAAAAATAGATGAGACCCTTGAAAGACTCCGGGAACTTCAAGAGGCCACGGATGAGCTG
GACCTCAAGCTGCGCCAAGCTGAGGTGATCAAGGGATCCTGGCAGCCCGTGGGCGATCTCCTCATTGACTCTCTC
CAAGATCACCTCGAGAAAGTCAAGGCACTTCGAGGAGAAATTGCGCCTCTGAAAGAGAACGTGAGCCACGTCAAT
GACCTTGCTCGCCAGCTTACCACTTTGGGCATTCAGCTCTCACCGTATAACCTCAGCACTCTGGAAGACCTGAAC
ACCAGATGGAAGCTTCTGCAGGTGGCCGTCGAGGACCGAGTCAGGCAGCTGCATGAAGCCCACAGGGACTTTGGT
CCAGCATCTCAGCACTTTCTTTCCACGTCTGTCCAGGGTCCCTGGGAGAGAGCCATCTCGCCAAACAAAGTGCCC
TACTATATCAACCACGAGACTCAAACAACTTGCTGGGACCATCCCAAAATGACAGAGCTCTACCAGTCTTTAGCT
GACCTGAATAATGTCAGATTCTCAGCTTATAGGACTGCCATGAAACTCCGAAGACTGCAGAAGGCCCTTTGCTTG
GATCTCTTGAGCCTGTCAGCTGCATGTGATGCCTTGGACCAGCACAACCTCAAGCAAAATGACCAGCCCATGGAT
ATCCTGCAGATTATTAATTGTTTGACCACTATTTATGACCGCCTGGAGCAAGAGCACAACAATTTGGTCAACGTC
CCTCTCTGCGTGGATATGTGTCTGAACTGGCTGCTGAATGTTTATGATACGGGACGAACAGGGAGGATCCGTGTC
CTGTCTTTTAAAACTGGCATCATTTCCCTGTGTAAAGCACATTTGGAAGACAAGTACAGATACCTTTTCAAGCAA
GTGGCAAGITCAACAGGATTTTGTGACCAGCGCAGGCTGGGCCTCCTTCTGCATGATTCTATCCAAATTCCAAGA
CAGTTGGGTGAAGTTGCATCCTTTGGGGGCAGTAACATTGAGCCAAGTGTCCGGAGCTGCTTCCAATTTGCTAAT
AATAAGCCAGAGATCGAAGCGGCCCTCTTCCTAGACTGGATGAGACTGGAACCCCAGTCCATGGTGTGGCTGCCC
GTCCTGCACAGAGTGGCTGCTGCAGAAACTGCCAAGCATCAGGCCAAATGTAACATCTGCAAAGAGTGTCCAATC
ATTGGATTCAGGTACAGGAGTCTAAAGCACTTTAATTATGACATCTGCCAAAGCTGCTTTTTTTCTGGTCGAGTT
GCAAAAGGCCATAAAATGCACTATCCCATGGTGGAATATTGCACTCCGACTACATCAGGAGAAGATGTTCGAGAC
TTTGCCAAGGTACTAAAAAACAAATTTCGAACCAAAAGGTATTTTGCGAAGCATCCCCGAATGGGCTACCTGCCA
GTGCAGACTGTCTTAGAGGGGGACAACATGGAAACTCCCGTTACTCTGATCAACTTCTGGCCAGTAGATTCTGCG
CCTGCCTCGTCCCCTCAGCTTTCACACGATGATACTCATTCACGCATTGAACATTATGCTAGCAGGCTAGCAGAA
ATGGAAAACAGCAATGGATCTTATCTAAATGATAGCATCTCTCCTAATGAGAGCATAGATGATGAACATTTGTTA
ATCCAGCATTACTGCCAAAGTTTGAACCAGGACTCCCCCCTGAGCCAGCCTCGTAGTCCTGCCCAGATCTTGATT
TCCTTAGAGAGTGAGGAAAGAGGGGAGCTAGAGAGAATCCTAGCAGATCTTGAGGAAGAAAACAGGAATCTGCAA
GCAGAATATGACCGTCTAAAGCAGCAGCACGAACATAAAGGCCTGTCCCCACTGCCGTCCCCTCCTGAAATGATG
CCCACCTCTCCCCAGAGTCCCCGGGATGCTGAGCTCATTGCTGAGGCCAAGCTACTGCGTCAACACAAAGGCCGC
CTGGAAGCCAGGATGCAAATCCTGGAAGACCACAATAAACAGCTGGAGTCACAGTTACACAGGCTAAGGCAGCTG
CTGGAGCAACCCCAGGCAGAGGCCAAAGTGAATGGCACAACGGTGTCCTCTCCTTCTACCTCTCTACAGAGGTCC
GACAGCAGTCAGCCTATGCTGCTCCGAGTGGTTGGCAGTCAAACTTCGGACTCCATGGGTGAGGAAGATCTTCTC
AGTCCTCCCCAGGACACAAGCACAGGGTTAGAGGAGGTGATGGAGCAACTCAACAACTCCTTCCCTAGTTCAAGA
GGAAGAAATACCCCTGGAAAGCCAATGAGAGAGGACACAATG
Nterm-R1_R17-R19_R24 to end of dystrophin:
(SEQ ID NO: 131)
ATGCTTTGGTGGGAAGAAGTAGAGGACTGTTATGAAAGAGAAGATGTTCAAAAGAAAACATTCACAAAATGGGTA
AATGCACAATTTTCTAAGTTTGGGAAGCAGCATATTGAGAACCTCTTCAGTGACCTACAGGATGGGAGGCGCCTC
CTAGACCTCCTCGAAGGCCTGACAGGGCAAAAACTGCCAAAAGAAAAAGGATCCACAAGAGTTCATGCCCTGAAC
AATGTCAACAAGGCACTGCGGGTTTTGCAGAACAATAATGTTGATTTAGTGAATATTGGAAGTACTGACATCGTA
GATGGAAATCATAAACTGACTCTTGGTTTGATTTGGAATATAATCCTCCACTGGCAGGTCAAAAATGTAATGAAA
AATATCATGGCTGGATTGCAACAAACCAACAGTGAAAAGATTCTCCTGAGCTGGGTCCGACAATCAACTCGTAAT
TATCCACAGGTTAATGTAATCAACTTCACCACCAGCTGGTCTGATGGCCTGGCTTTGAATGCTCTCATCCATAGT
CATAGGCCAGACCTATTTGACTGGAATAGTGTGGTTTGCCAGCAGTCAGCCACACAACGACTGGAACATGCATTC
AACATCGCCAGATATCAATTAGGCATAGAGAAACTACTCGATCCTGAAGATGTTGATACCACCTATCCAGATAAG
AAGTCCATCTTAATGTACATCACATCACTCTTCCAAGTTTTGCCTCAACAAGTGAGCATTGAAGCCATCCAGGAA
GTGGAAATGTTGCCAAGGCCACCTAAAGTGACTAAAGAAGAACATTTTCAGTTACATCATCAAATGCACTATTCT
CAACAGATCACGGTCAGTCTAGCACAGGGATATGAGAGAACTTCTTCCCCTAAGCCTCGATTCAAGAGCTATGCC
TACACACAGGCTGCTTATGTCACCACCTCTGACCCTACACGGAGCCCATTTCCTTCACAGCATTTGGAAGCTCCT
GAAGACAAGTCATTTGGCAGTTCATTGATGGAGAGTGAAGTAAACCTGGACCGTTATCAAACAGCTTTAGAAGAA
GTATTATCGTGGCTTCTTTCTGCTGAGGACACATTGCAAGCACAAGGAGAGATTTCTAATGATGTGGAAGTGGTG
AAAGACCAGTTTCATACTCATGAGGGGTACATGATGGATTTGACAGCCCATCAGGGCCGGGTTGGTAATATTCTA
CAATTGGGAAGTAAGCTGATTGGAACAGGAAAATTATCAGAAGATGAAGAAACTGAAGTACAAGAGCAGATGAAT
CTCCTAAATTCAAGATGGGAATGCCTCAGGGTAGCTAGCATGGAAAAACAAAGCAATTTACATAGAGTTTTAATG
GATAGATCTGTTGAGAAATGGCGGCGTTTTCATTATGATATAAAGATATTTAATCAGTGGCTAACAGAAGCTGAA
CAGTTTCTCAGAAAGACACAAATTCCTGAGAATTGGGAACATGCTAAATACAAATGGTATCTTAAGGAACTCCAG
GATGGCATTGGGCAGCGGCAAACTGTTGTCAGAACATTGAATGCAACTGGGGAAGAAATAATTCAGCAATCCTCA
AAAACAGATGCCAGTATTCTACAGGAAAAATTGGGAAGCCTGAATCTGCGGTGGCAGGAGGTCTGCAAACAGCTG
TCAGACAGAAAAAAGAGGCTAGAAGAACAAAAGAATATCTTGTCAGAATTTCAAAGAGATTTAAATGAATTTGTT
TTATGGTTGGAGGAAGCAGATAACATTGCTAGTATCCCACTTGAACCTGGAAAAGAGCAGCAACTAAAAGAAAAG
CTTGAGCAAGTCAAGTTACTGGTGGAAGAGTTGCCCCTGCGCCAGGGAATTCTCAAACAATTAAATGAAACTGGA
GGACCCGTGCTTGTAAGTGCTCCCATAAGCCCAGAAGAGCAAGATAAACTTGAAAATAAGCTCAAGCAGACAAAT
CTCCAGTGGATAAAGGTTTCCAGAGCTTTACCTGAGAAACAAGGAGAAATTGAAGCTCAAATAAAAGACCTTGGG
CAGCTTGAAAAAAAGCTTGAAGACCTTGAAGAGCAGTTAAATCATCTGCTGCTGTGGTTATCTCCTATTAGGAAT
CAGTTGGAAATTTATAACCAACCAAACCAAGAAGGACCATTTGACGTTAAGGAAACTGAAATAGCAGTTCAAGCT
AAACAACCGGATGTGGAAGAGATTTTGTCTAAAGGGCAGCATTTGTACAAGGAAAAACCAGCCACTCAGCCAGTG
AAGAGGAAGTTAGAAGATCTGAGCTCTGAGTGGAAGGCGGTAAACCGTTTACTTCAAGAGCTGAGGGCAAAGCAG
TGGCAGAGAAAAATAGATGAGACCCTTGAAAGACTCCGGGAACTTCAAGAGGCCACGGATGAGCTGGACCTCAAG
CTGCGCCAAGCTGAGGTGATCAAGGGATCCTGGCAGCCCGTGGGCGATCTCCTCATTGACTCTCTCCAAGATCAC
CTCGAGAAAGTCAAGGCACTTCGAGGAGAAATTGCGCCTCTGAAAGAGAACGTGAGCCACGTCAATGACCTTGCT
CGCCAGCTTACCACTTTGGGCATTCAGCTCTCACCGTATAACCTCAGCACTCTGGAAGACCTGAACACCAGATGG
AAGCTTCTGCAGGTGGCCGTCGAGGACCGAGTCAGGCAGCTGCATGAAGCCCACAGGGACTTTGGTCCAGCATCT
CAGCACTTTCTTTCCACGTCTGTCCAGGGTCCCTGGGAGAGAGCCATCTCGCCAAACAAAGTGCCCTACTATATC
AACCACGAGACTCAAACAACTTGCTGGGACCATCCCAAAATGACAGAGCTCTACCAGTCTTTAGCTGACCTGAAT
AATGTCAGATTCTCAGCTTATAGGACTGCCATGAAACTCCGAAGACTGCAGAAGGCCCTTTGCTTGGATCTCTTG
AGCCTGTCAGCTGCATGTGATGCCTTGGACCAGCACAACCTCAAGCAAAATGACCAGCCCATGGATATCCTGCAG
ATTATTAATTGTTTGACCACTATTTATGACCGCCTGGAGCAAGAGCACAACAATTTGGTCAACGTCCCTCTCTGC
GTGGATATGTGTCTGAACTGGCTGCTGAATGTTTATGATACGGGACGAACAGGGAGGATCCGTGTCCTGTCTTTT
AAAACTGGCATCATTTCCCTGTGTAAAGCACATTTGGAAGACAAGTACAGATACCTTTTCAAGCAAGTGGCAAGT
TCAACAGGATTTTGTGACCAGCGCAGGCTGGGCCTCCTTCTGCATGATTCTATCCAAATTCCAAGACAGTTGGGT
GAAGTTGCATCCTTTGGGGGCAGTAACATTGAGCCAAGTGTCCGGAGCTGCTTCCAATTTGCTAATAATAAGCCA
GAGATCGAAGCGGCCCTCTTCCTAGACTGGATGAGACTGGAACCCCAGTCCATGGTGTGGCTGCCCGTCCTGCAC
AGAGTGGCTGCTGCAGAAACTGCCAAGCATCAGGCCAAATGTAACATCTGCAAAGAGTGTCCAATCATTGGATTC
AGGTACAGGAGTCTAAAGCACTTTAATTATGACATCTGCCAAAGCTGCTTTTTTTCTGGTCGAGTTGCAAAAGGC
CATAAAATGCACTATCCCATGGTGGAATATTGCACTCCGACTACATCAGGAGAAGATGTTCGAGACTTTGCCAAG
GTACTAAAAAACAAATTTCGAACCAAAAGGTATTTTGCGAAGCATCCCCGAATGGGCTACCTGCCAGTGCAGACT
GTCTTAGAGGGGGACAACATGGAAACTCCCGTTACTCTGATCAACTTCTGGCCAGTAGATTCTGCGCCTGCCTCG
TCCCCTCAGCTTTCACACGATGATACTCATTCACGCATTGAACATTATGCTAGCAGGCTAGCAGAAATGGAAAAC
AGCAATGGATCTTATCTAAATGATAGCATCTCTCCTAATGAGAGCATAGATGATGAACATTTGTTAATCCAGCAT
TACTGCCAAAGTTTGAACCAGGACTCCCCCCTGAGCCAGCCTCGTAGTCCTGCCCAGATCTTGATTTCCTTAGAG
AGTGAGGAAAGAGGGGAGCTAGAGAGAATCCTAGCAGATCTTGAGGAAGAAAACAGGAATCTGCAAGCAGAATAT
GACCGTCTAAAGCAGCAGCACGAACATAAAGGCCTGTCCCCACTGCCGTCCCCTCCTGAAATGATGCCCACCTCT
CCCCAGAGTCCCCGGGATGCTGAGCTCATTGCTGAGGCCAAGCTACTGCGTCAACACAAAGGCCGCCTGGAAGCC
AGGATGCAAATCCTGGAAGACCACAATAAACAGCTGGAGTCACAGTTACACAGGCTAAGGCAGCTGCTGGAGCAA
CCCCAGGCAGAGGCCAAAGTGAATGGCACAACGGTGTCCTCTCCTTCTACCTCTCTACAGAGGTCCGACAGCAGT
CAGCCTATGCTGCTCCGAGTGGTTGGCAGTCAAACTTCGGACTCCATGGGTGAGGAAGATCTTCTCAGTCCTCCC
CAGGACACAAGCACAGGGTTAGAGGAGGTGATGGAGCAACTCAACAACTCCTTCCCTAGTTCAAGAGGAAGAAAT
ACCCCTGGAAAGCCAATGAGAGAGGACACAATG

### Cardiac Muscle Micro-Dystrophins

[0071] The present disclosure provides micro-dystrophin genes and proteins optimized for cardiac muscle. The inventors have found that certain combinations of domains from full-length dystrophin are beneficial for cardiac muscle. However, these same micro-dystrophins are also beneficial for skeletal muscle.

[0072] In some embodiments, a micro-dystrophin protein optimized for cardiac muscle does not comprise spectrin-like repeat 2 and/or spectrin-like repeat 3 of dystrophin. In some embodiments, a micro-dystrophin protein does not comprise spectrin-like repeat 2. In some embodiments, a micro-dystrophin protein does not comprise spectrin-like repeat 3. In some embodiments, a micro-dystrophin protein does not comprise spectrin-like repeat 2 and spectrin-like repeat 3. The inventors have found that including spectrin-like repeat 1 but not spectrin-like repeat 2 and/or spectrin-like repeat 3 is beneficial to the heart as such micro-dystrophin proteins outcompete utrophin for its membrane binding in the heart to a lesser extent, thus mitigating the harmful effects of displacing utrophin. Harmful effects of displacing utrophin include cardiomyopathy and heart failure.

[0073] In some embodiments, a micro-dystrophin protein optimized for cardiac muscle comprises an amino-terminal actin-binding domain, hinge domain 1, spectrin-like repeat 1, spectrin-like repeat 17, spectrin-like repeat 18, and spectrin-like repeat 19 of dystrophin. In some embodiments, the micro-dystrophin protein does not contain spectrin-like repeat 2 and/or spectrin-like repeat 3 of dystrophin. In some embodiments, the micro-dystrophin protein does not comprise spectrin-like repeat 2. In some embodiments, the micro-dystrophin protein does not comprise spectrin-like repeat 3. In some embodiments, the micro-dystrophin protein does not comprise spectrin-like repeat 2 and spectrin-like repeat 3.

[0074] In some embodiments, a micro-dystrophin protein optimized for cardiac muscle comprises one or more of: spectrin-like repeat 24, hinge domain 4, and dystroglycan binding site of dystrophin. In some embodiments, a micro-dystrophin protein optimized for cardiac muscle comprises spectrin-like repeat 24 and hinge domain 4. In some embodiments, a micro-dystrophin protein optimized for cardiac muscle comprises spectrin-like repeat 24 and the dystroglycan binding site of dystrophin. In some embodiments, a micro-dystrophin protein optimized for cardiac muscle comprises hinge domain 4 and the dystroglycan binding site of dystrophin.

[0075] In some embodiments, a micro-dystrophin protein optimized for cardiac muscle comprises one or more syntrophin binding domains of dystrophin.

[0076] In some embodiments, a micro-dystrophin protein optimized for cardiac muscle comprises one or more coiled coil domains of dystrophin.

[0077] In some embodiments, a micro-dystrophin protein optimized for cardiac muscle comprises spectrin-like repeat 1 directly coupled to spectrin-like repeat 17.

[0078] In some embodiments, a micro-dystrophin protein optimized for cardiac muscle comprises spectrin-like repeat 19 directly coupled to spectrin-like repeat 24. In some embodiments, a micro-dystrophin protein optimized for cardiac muscle comprises spectrin-like repeat 19 directly coupled to hinge domain 4.

[0079] In some embodiments, a micro-dystrophin protein optimized for cardiac muscle comprises the region of dystrophin that is C-terminal to the cysteine-rich portion of the C-terminal region (FIGS. 1 and 2). In some embodiments, a micro-dystrophin protein optimized for cardiac muscle comprises the region of dystrophin that is C-terminal to the dystroglycan binding site of dystrophin.

[0080] In some embodiments, a micro-dystrophin protein optimized for cardiac muscle comprises the region of dystrophin from spectrin-like repeat 24 to the C-terminus. In some embodiments, a micro-dystrophin protein optimized for cardiac muscle comprises the region of dystrophin from spectrin-like repeat 24 to the end of the proline rich region following the first coiled coil domain.

[0081] In some embodiments, a micro-dystrophin protein optimized for cardiac muscle comprises the region of dystrophin from hinge domain 4 to the C-terminus. In some embodiments, a micro-dystrophin protein optimized for cardiac muscle comprises the region of dystrophin from hinge domain 4 to the end of the proline rich region following the first coiled coil domain. In some embodiments, a micro-dystrophin protein optimized for cardiac muscle comprises the region of dystrophin from hinge domain 4 to the end of the second syntrophin binding domain (or “syntrophin region” or “syntrophin binding site”).

[0082] Domains of the dystrophin protein are known in the art. Exemplary sequences of domains of the dystrophin protein or combinations thereof are provided in Examples 1 and 4. In some embodiments, a protein of the disclosure comprises an amino-terminal actin-binding domain and hinge domain 1 region comprising an amino acid sequence that is at least 65%, at least 68%, at least 70%, at least 75%, at least 80%, at least 85%, at least 90%, at least 91%, at least 92%, at least 93%, at least 94%, at least 95%, at least 96%, at least 97%, at least 98%, at least 99%, or 100% identical to the amino acid sequence of SEQ ID NO: 40. In some embodiments, a protein of the disclosure comprises an amino-terminal actin-binding domain and hinge domain 1 region comprising an amino acid sequence that is at least 65%, at least 68%, at least 70%, at least 75%, at least 80%, at least 85%, at least 90%, at least 91%, at least 92%, at least 93%, at least 94%, at least 95%, at least 96%, at least 97%, at least 98%, at least 99%, or 100% identical to the amino acid sequence of SEQ ID NO: 203. In some embodiments, a protein of the disclosure comprises a spectrin-like repeat 1 comprising an amino acid sequence that is at least 65%, at least 68%, at least 70%, at least 75%, at least 80%, at least 85%, at least 90%, at least 91%, at least 92%, at least 93%, at least 94%, at least 95%, at least 96%, at least 97%, at least 98%, at least 99%, or 100% identical to the amino acid sequence of SEQ ID NO: 41. In some embodiments, a protein of the disclosure comprises a spectrin-like repeat 2 comprising an amino acid sequence that is at least 65%, at least 68%, at least 70%, at least 75%, at least 80%, at least 85%, at least 90%, at least 91%, at least 92%, at least 93%, at least 94%, at least 95%, at least 96%, at least 97%, at least 98%, at least 99%, or 100% identical to the amino acid sequence of SEQ ID NO: 42. In some embodiments, a protein of the disclosure comprises a spectrin-like repeat 3 comprising an amino acid sequence that is at least 65%, at least 68%, at least 70%, at least 75%, at least 80%, at least 85%, at least 90%, at least 91%, at least 92%, at least 93%, at least 94%, at least 95%, at least 96%, at least 97%, at least 98%, at least 99%, or 100% identical to the amino acid sequence of SEQ ID NO: 43. In some embodiments, a protein of the disclosure comprises a spectrin-like repeat 16 comprising an amino acid sequence that is at least 65%, at least 68%, at least 70%, at least 75%, at least 80%, at least 85%, at least 90%, at least 91%, at least 92%, at least 93%, at least 94%, at least 95%, at least 96%, at least 97%, at least 98%, at least 99%, or 100% identical to the amino acid sequence of SEQ ID NO: 44. In some embodiments, a protein of the disclosure comprises a spectrin-like repeat 16 comprising an amino acid sequence that is at least 65%, at least 68%, at least 70%, at least 75%, at least 80%, at least 85%, at least 90%, at least 91%, at least 92%, at least 93%, at least 94%, at least 95%, at least 96%, at least 97%, at least 98%, at least 99%, or 100% identical to the amino acid sequence of SEQ ID NO: 44 without the linker sequence. In some embodiments, a protein of the disclosure comprises a spectrin-like repeat 16 comprising an amino acid sequence that is at least 65%, at least 68%, at least 70%, at least 75%, at least 80%, at least 85%, at least 90%, at least 91%, at least 92%, at least 93%, at least 94%, at least 95%, at least 96%, at least 97%, at least 98%, at least 99%, or 100% identical to the amino acid sequence of SEQ ID NO: 197. In some embodiments, a protein of the disclosure comprises a spectrin-like repeat 17 comprising an amino acid sequence that is at least 65%, at least 68%, at least 70%, at least 75%, at least 80%, at least 85%, at least 90%, at least 91%, at least 92%, at least 93%, at least 94%, at least 95%, at least 96%, at least 97%, at least 98%, at least 99%, or 100% identical to the amino acid sequence of SEQ ID NO: 45. In some embodiments, a protein of the disclosure comprises a spectrin-like repeat 17 comprising an amino acid sequence that is at least 65%, at least 68%, at least 70%, at least 75%, at least 80%, at least 85%, at least 90%, at least 91%, at least 92%, at least 93%, at least 94%, at least 95%, at least 96%, at least 97%, at least 98%, at least 99%, or 100% identical to the amino acid sequence of SEQ ID NO: 198. In some embodiments, a protein of the disclosure comprises spectrin-like repeats 17-19 comprising an amino acid sequence that is at least 65%, at least 68%, at least 70%, at least 75%, at least 80%, at least 85%, at least 90%, at least 91%, at least 92%, at least 93%, at least 94%, at least 95%, at least 96%, at least 97%, at least 98%, at least 99%, or 100% identical to the amino acid sequence of SEQ ID NO: 46. In some embodiments, a protein of the disclosure comprises spectrin-like repeats 17-19 comprising an amino acid sequence that is at least 65%, at least 68%, at least 70%, at least 75%, at least 80%, at least 85%, at least 90%, at least 91%, at least 92%, at least 93%, at least 94%, at least 95%, at least 96%, at least 97%, at least 98%, at least 99%, or 100% identical to the amino acid sequence of SEQ ID NO: 186. In some embodiments, a protein of the disclosure comprises spectrin-like repeats 18-19 comprising an amino acid sequence that is at least 65%, at least 68%, at least 70%, at least 75%, at least 80%, at least 85%, at least 90%, at least 91%, at least 92%, at least 93%, at least 94%, at least 95%, at least 96%, at least 97%, at least 98%, at least 99%, or 100% identical to the amino acid sequence of SEQ ID NO: 199. In some embodiments, a protein of the disclosure comprises a hinge domain 3 comprising an amino acid sequence that is at least 65%, at least 68%, at least 70%, at least 75%, at least 80%, at least 85%, at least 90%, at least 91%, at least 92%, at least 93%, at least 94%, at least 95%, at least 96%, at least 97%, at least 98%, at least 99%, or 100% identical to the amino acid sequence of SEQ ID NO: 204. In some embodiments, a protein of the disclosure comprises a spectrin-like repeat 21 comprising an amino acid sequence that is at least 65%, at least 68%, at least 70%, at least 75%, at least 80%, at least 85%, at least 90%, at least 91%, at least 92%, at least 93%, at least 94%, at least 95%, at least 96%, at least 97%, at least 98%, at least 99%, or 100% identical to the amino acid sequence of SEQ ID NO: 205. In some embodiments, a protein of the disclosure comprises a spectrin-like repeat 22 comprising an amino acid sequence that is at least 65%, at least 68%, at least 70%, at least 75%, at least 80%, at least 85%, at least 90%, at least 91%, at least 92%, at least 93%, at least 94%, at least 95%, at least 96%, at least 97%, at least 98%, at least 99%, or 100% identical to the amino acid sequence of SEQ ID NO: 206. In some embodiments, a protein of the disclosure comprises a spectrin-like repeat 22 comprising an amino acid sequence that is at least 65%, at least 68%, at least 70%, at least 75%, at least 80%, at least 85%, at least 90%, at least 91%, at least 92%, at least 93%, at least 94%, at least 95%, at least 96%, at least 97%, at least 98%, at least 99%, or 100% identical to the amino acid sequence of SEQ ID NO: 206 without the linker sequence. In some embodiments, a protein of the disclosure comprises a spectrin-like repeat 23 comprising an amino acid sequence that is at least 65%, at least 68%, at least 70%, at least 75%, at least 80%, at least 85%, at least 90%, at least 91%, at least 92%, at least 93%, at least 94%, at least 95%, at least 96%, at least 97%, at least 98%, at least 99%, or 100% identical to the amino acid sequence of SEQ ID NO: 47. In some embodiments, a protein of the disclosure comprises a spectrin-like repeat 23 comprising an amino acid sequence that is at least 65%, at least 68%, at least 70%, at least 75%, at least 80%, at least 85%, at least 90%, at least 91%, at least 92%, at least 93%, at least 94%, at least 95%, at least 96%, at least 97%, at least 98%, at least 99%, or 100% identical to the amino acid sequence of SEQ ID NO: 187. In some embodiments, a protein of the disclosure comprises a spectrin-like repeat 23 comprising an amino acid sequence that is at least 65%, at least 68%, at least 70%, at least 75%, at least 80%, at least 85%, at least 90%, at least 91%, at least 92%, at least 93%, at least 94%, at least 95%, at least 96%, at least 97%, at least 98%, at least 99%, or 100% identical to the amino acid sequence of SEQ ID NO: 200. In some embodiments, a protein of the disclosure comprises a spectrin-like repeat 24 comprising an amino acid sequence that is at least 65%, at least 68%, at least 70%, at least 75%, at least 80%, at least 85%, at least 90%, at least 91%, at least 92%, at least 93%, at least 94%, at least 95%, at least 96%, at least 97%, at least 98%, at least 99%, or 100% identical to the amino acid sequence of SEQ ID NO: 48. In some embodiments, a protein of the disclosure comprises a spectrin-like repeat 24 comprising an amino acid sequence that is at least 65%, at least 68%, at least 70%, at least 75%, at least 80%, at least 85%, at least 90%, at least 91%, at least 92%, at least 93%, at least 94%, at least 95%, at least 96%, at least 97%, at least 98%, at least 99%, or 100% identical to the amino acid sequence of SEQ ID NO: 201. In some embodiments, a protein of the disclosure comprises a hinge domain 4 and dystroglycan binding site (also referred to herein as “trCterm”) comprising an amino acid sequence that is at least 65%, at least 68%, at least 70%, at least 75%, at least 80%, at least 85%, at least 90%, at least 91%, at least 92%, at least 93%, at least 94%, at least 95%, at least 96%, at least 97%, at least 98%, at least 99%, or 100% identical to the amino acid sequence of SEQ ID NO: 49. In some embodiments, a protein of the disclosure comprises a hinge domain 4 and dystroglycan binding site (also referred to herein as “trCterm”) comprising an amino acid sequence that is at least 65%, at least 68%, at least 70%, at least 75%, at least 80%, at least 85%, at least 90%, at least 91%, at least 92%, at least 93%, at least 94%, at least 95%, at least 96%, at least 97%, at least 98%, at least 99%, or 100% identical to the amino acid sequence of SEQ ID NO: 202. In some embodiments, a protein of the disclosure comprises a syntrophin binding region comprising an amino acid sequence that is at least 65%, at least 68%, at least 70%, at least 75%, at least 80%, at least 85%, at least 90%, at least 91%, at least 92%, at least 93%, at least 94%, at least 95%, at least 96%, at least 97%, at least 98%, at least 99%, or 100% identical to the amino acid sequence of SEQ ID NO: 50. In some embodiments, a protein of the disclosure comprises a 1st coiled coil region and proline rich region comprising an amino acid sequence that is at least 65%, at least 68%, at least 70%, at least 75%, at least 80%, at least 85%, at least 90%, at least 91%, at least 92%, at least 93%, at least 94%, at least 95%, at least 96%, at least 97%, at least 98%, at least 99%, or 100% identical to the amino acid sequence of SEQ ID NO: 51. In some embodiments, a protein of the disclosure comprises a 1st coiled coil region comprising an amino acid sequence that is at least 65%, at least 68%, at least 70%, at least 75%, at least 80%, at least 85%, at least 90%, at least 91%, at least 92%, at least 93%, at least 94%, at least 95%, at least 96%, at least 97%, at least 98%, at least 99%, or 100% identical to the amino acid sequence of SEQ ID NO: 51 without the proline rich region. In some embodiments, a protein of the disclosure comprises a 2nd coiled coil region to end of dystrophin comprising an amino acid sequence that is at least 65%, at least 68%, at least 70%, at least 75%, at least 80%, at least 85%, at least 90%, at least 91%, at least 92%, at least 93%, at least 94%, at least 95%, at least 96%, at least 97%, at least 98%, at least 99%, or 100% identical to the amino acid sequence of SEQ ID NO: 52.

[0083] Domains of the utrophin protein are known in the art. Exemplary sequences of domains of the utrophin protein or combinations thereof are provided in Example 4. In some embodiments, a protein of the disclosure comprises an amino-terminal domain of utrophin comprising an amino acid sequence that is at least 65%, at least 68%, at least 70%, at least 75%, at least 80%, at least 85%, at least 90%, at least 91%, at least 92%, at least 93%, at least 94%, at least 95%, at least 96%, at least 97%, at least 98%, at least 99%, or 100% identical to the amino acid sequence of SEQ ID NO: 191. In some embodiments, a protein of the disclosure comprises a repeat 1 domain of utrophin comprising an amino acid sequence that is at least 65%, at least 68%, at least 70%, at least 75%, at least 80%, at least 85%, at least 90%, at least 91%, at least 92%, at least 93%, at least 94%, at least 95%, at least 96%, at least 97%, at least 98%, at least 99%, or 100% identical to the amino acid sequence of SEQ ID NO: 192. In some embodiments, a protein of the disclosure comprises a repeat 2 domain of utrophin comprising an amino acid sequence that is at least 65%, at least 68%, at least 70%, at least 75%, at least 80%, at least 85%, at least 90%, at least 91%, at least 92%, at least 93%, at least 94%, at least 95%, at least 96%, at least 97%, at least 98%, at least 99%, or 100% identical to the amino acid sequence of SEQ ID NO: 193. In some embodiments, a protein of the disclosure comprises a repeat 3 domain of utrophin comprising an amino acid sequence that is at least 65%, at least 68%, at least 70%, at least 75%, at least 80%, at least 85%, at least 90%, at least 91%, at least 92%, at least 93%, at least 94%, at least 95%, at least 96%, at least 97%, at least 98%, at least 99%, or 100% identical to the amino acid sequence of SEQ ID NO: 194. In some embodiments, a protein of the disclosure comprises a hinge domain 2 of utrophin comprising an amino acid sequence that is at least 65%, at least 68%, at least 70%, at least 75%, at least 80%, at least 85%, at least 90%, at least 91%, at least 92%, at least 93%, at least 94%, at least 95%, at least 96%, at least 97%, at least 98%, at least 99%, or 100% identical to the amino acid sequence of SEQ ID NO: 195.

[0084] In some embodiments, a protein of the disclosure comprises an amino acid sequence that has up to 10 (e.g., 1, 2, 3, 4, 5, 6, 7, 8, 9, or 10) amino acid additions or deletions relative to a sequence provided herein (e.g., any one of SEQ ID NOs. 40-52, 186, 187, 191-195, 197-206).

[0085] A nucleotide sequence encoding a micro-dystrophin protein optimized for cardiac muscle is further understood to include nucleotide sequences that are variants of any one of SEQ ID Nos. 7-12, 85-92, and 126-131. Variant nucleotide sequences include sequences that differ by one or more (e.g., 1, 2, 3, 4, 5, 6, 7, 8, 9, 10, 11, 12, 13, 14, 15, 16, 17, 18, 19, 20, or more) nucleotide substitutions, additions or deletions, such as allelic variants, and will, therefore, include coding sequences that differ from the nucleotide sequence of the coding sequence designated in any one of SEQ ID Nos. 7-12, 85-92, and 126-131.

[0086] In some embodiments, a micro-dystrophin protein optimized for cardiac muscle is encoded by a nucleic acid comprising a nucleotide sequence that is at least at least 70%, at least 75%, at least 80%, at least 85%, at least 90%, at least 91%, at least 92%, at least 93%, at least 94%, at least 95%, at least 96%, at least 97%, at least 98%, at least 99%, or 100% identical to the nucleotide sequence of any one of SEQ ID Nos. 7-12, 85-92, and 126-131.

[0087] In some embodiments, a micro-dystrophin protein optimized for cardiac muscle is encoded by a nucleic acid consisting essentially of a nucleotide sequence that is at least 70%, at least 75%, at least 80%, at least 85%, at least 90%, at least 91%, at least 92%, at least 93%, at least 94%, at least 95%, at least 96%, at least 97%, at least 98%, at least 99%, or 100% identical to the nucleotide sequence of any one of SEQ ID Nos. 7-12, 85-92, and 126-131.

[0088] In some embodiments, a micro-dystrophin protein optimized for cardiac muscle is encoded by a nucleic acid consisting of a nucleotide sequence that is at least 70%, at least 75%, at least 80%, at least 85%, at least 90%, at least 91%, at least 92%, at least 93%, at least 94%, at least 95%, at least 96%, at least 97%, at least 98%, at least 99%, or 100% identical to the nucleotide sequence of any one of SEQ ID Nos. 7-12, 85-92, and 126-131.

[0089] In some embodiments, it is desirable to avoid overexpression of micro-dystrophin proteins in the heart. Thus, in some embodiments, a nucleotide sequence encoding a micro-dystrophin protein optimized for cardiac muscle may be codon optimized for lower protein expression. In some embodiments, one or more codons (e.g., 1, 2, 3, 4, 5, 6, 7, 8, 9, 10, 11, 12, 13, 14, 15, 16, 17, 18, 19, 20, or more) are substituted for a rare codon.

[0090] Non-limiting examples of human micro-dystrophin proteins optimized for cardiac muscle are described below.

Nterm-R1_R17-R19_R24 + H4 + trCterm:
(SEQ ID NO: 1)
MLWWEEVEDCYEREDVQKKTFTKWVNAQFSKFGKQHIENLFSDLQDGRRLLDLLEGLTGQKLPKEKGSTRVHALN
NVNKALRVLQNNNVDLVNIGSTDIVDGNHKLTLGLIWNIILHWQVKNVMKNIMAGLQQTNSEKILLSWVRQSTRN
YPQVNVINFTTSWSDGLALNALIHSHRPDLFDWNSVVCQQSATQRLEHAFNIARYQLGIEKLLDPEDVDTTYPDK
KSILMYITSLFQVLPQQVSIEAIQEVEMLPRPPKVTKEEHFQLHHQMHYSQQITVSLAQGYERTSSPKPRFKSYA
YTQAAYVTTSDPTRSPFPSQHLEAPEDKSFGSSLMESEVNLDRYQTALEEVLSWLLSAEDTLQAQGEISNDVEVV
KDQFHTHEGYMMDLTAHQGRVGNILQLGSKLIGTGKLSEDEETEVQEQMNLLNSRWECLRVASMEKQSNLHRVLM
DRFDRSVEKWRRFHYDIKIFNQWLTEAEQFLRKTQIPENWEHAKYKWYLKELQDGIGQRQTVVRILNATGEEIIQ
QSSKTDASILQEKLGSLNLRWQEVCKQLSDRKKRLEEQKNILSEFQRDLNEFVLWLEEADNIASIPLEPGKEQQL
KEKLEQVKLLVEELPLRQGILKQLNETGGPVLVSAPISPEEQDKLENKLKQTNLQWIKVSRALPEKQGEIEAQIK
DLGQLEKKLEDLEEQLNHLLLWLSPIRNQLEIYNQPNQEGPFDVKETEIAVQAKQPDVEEILSKGQHLYKEKPAT
QPVKRKLEDLSSEWKAVNRLLQELRAKQWQRKIDETLERLQELQEATDELDLKLRQAEVIKGSWQPVGDLLIDSL
QDHLEKVKALRGEIAPLKENVSHVNDLARQLTTLGIQLSPYNLSTLEDLNTRWKLLQVAVEDRVRQLHEAHRDFG
PASQHFLSTSVQGPWERAISPNKVPYYINHETQTTCWDHPKMTELYQSLADLNNVRFSAYRTAMKLRRLQKALCL
DLLSLSAACDALDQHNLKQNDQPMDILQIINCLTTIYDRLEQEHNNLVNVPLCVDMCLNWLLNVYDTGRTGRIRV
LSFKTGIISLCKAHLEDKYRYLFKQVASSTGFCDQRRLGLLLHDSIQIPRQLGEVASFGGSNIEPSVRSCFQFAN
NKPEIEAALFLDWMRLEPQSMVWLPVLHRVAAAETAKHQAKCNICKECPIIGFRYRSLKHFNYDICQSCFFSGRV
AKGHKMHYPMVEYCTPTTSGEDVRDFAKVLKNKFRTKRYFAKHPRMGYLPVQTVLEGDNMETP
Nterm-R1_R17-R19_R24 + H4 + trCterm:
(SEQ ID NO: 120)
MLWWEEVEDCYEREDVQKKTFTKWVNAQFSKFGKQHIENLFSDLQDGRRLLDLLEGLTGQKLPKEKGSTRVHALN
NVNKALRVLQNNNVDLVNIGSTDIVDGNHKLILGLIWNIILHWQVKNVMKNIMAGLQQTNSEKILLSWVRQSTRN
YPQVNVINFTTSWSDGLALNALIHSHRPDLFDWNSVVCQQSATQRLEHAFNIARYQLGIEKLLDPEDVDTTYPDK
KSILMYITSLFQVLPQQVSIEAIQEVEMLPRPPKVTKEEHFQLHHQMHYSQQITVSLAQGYERTSSPKPRFKSYA
YTQAAYVTTSDPTRSPFPSQHLEAPEDKSFGSSLMESEVNLDRYQTALEEVLSWLLSAEDTLQAQGEISNDVEVV
KDQFHTHEGYMMDLTAHQGRVGNILQLGSKLIGTGKLSEDEETEVQEQMNLLNSRWECLRVASMEKQSNLHRVLM
DRSVEKWRRFHYDIKIFNQWLTEAEQFLRKTQIPENWEHAKYKWYLKELQDGIGQRQTVVRTLNATGEEIIQQSS
KTDASILQEKLGSLNLRWQEVCKQLSDRKKRLEEQKNILSEFQRDLNEFVLWLEEADNIASIPLEPGKEQQLKEK
LEQVKLLVEELPLRQGILKQLNETGGPVLVSAPISPEEQDKLENKLKQTNLQWIKVSRALPEKQGEIEAQIKDLG
QLEKKLEDLEEQLNHLLLWLSPIRNQLEIYNQPNQEGPFDVKETEIAVQAKQPDVEEILSKGQHLYKEKPATQPV
KRKLEDLSSEWKAVNRLLQELRAKQWQRKIDETLERLQELQEATDELDLKLRQAEVIKGSWQPVGDLLIDSLQDH
LEKVKALRGEIAPLKENVSHVNDLARQLTTLGIQLSPYNLSTLEDLNTRWKLLQVAVEDRVRQLHEAHRDFGPAS
QHFLSTSVQGPWERAISPNKVPYYINHETQTTCWDHPKMTELYQSLADLNNVRFSAYRTAMKLRRLQKALCLDLL
SLSAACDALDQHNLKQNDQPMDILQIINCLTTIYDRLEQEHNNLVNVPLCVDMCLNWLLNVYDTGRTGRIRVLSF
KTGIISLCKAHLEDKYRYLFKQVASSTGFCDQRRLGLLLHDSIQIPRQLGEVASFGGSNIEPSVRSCFQFANNKP
EIEAALFLDWMRLEPQSMVWLPVLHRVAAAETAKHQAKCNICKECPIIGFRYRSLKHFNYDICQSCFFSGRVAKG
HKMHYPMVEYCTPTTSGEDVRDFAKVLKNKFRTKRYFAKHPRMGYLPVQTVLEGDNMETP
Nterm-R1_R17-R19_H4 to 1st coiled coil and proline rich region that follows:
(SEQ ID NO: 2)
MLWWEEVEDCYEREDVQKKTFTKWVNAQFSKFGKQHIENLFSDLQDGRRLLDLLEGLTGQKLPKEKGSTRVHALN
NVNKALRVLQNNNVDLVNIGSTDIVDGNHKLTLGLIWNIILHWQVKNVMKNIMAGLQQTNSEKILLSWVRQSTRN
YPQVNVINFTTSWSDGLALNALIHSHRPDLFDWNSVVCQQSATQRLEHAFNIARYQLGIEKLLDPEDVDTTYPDK
KSILMYITSLFQVLPQQVSIEAIQEVEMLPRPPKVTKEEHFQLHHQMHYSQQITVSLAQGYERTSSPKPRFKSYA
YTQAAYVTTSDPTRSPFPSQHLEAPEDKSFGSSLMESEVNLDRYQTALEEVLSWLLSAEDTLQAQGEISNDVEVV
KDQFHTHEGYMMDLTAHQGRVGNILQLGSKLIGTGKLSEDEETEVQEQMNLLNSRWECLRVASMEKQSNLHRVLM
DRFDRSVEKWRRFHYDIKIFNQWLTEAEQFLRKTQIPENWEHAKYKWYLKELQDGIGQRQTVVRTLNATGEEIIQ
QSSKTDASILQEKLGSLNLRWQEVCKQLSDRKKRLEEQKNILSEFQRDLNEFVLWLEEADNIASIPLEPGKEQQL
KEKLEQVKLLVEELPLRQGILKQLNETGGPVLVSAPISPEEQDKLENKLKQTNLQWIKVSRALPEKQGEIEAQIK
DLGQLEKKLEDLEEQLNHLLLWLSPIRNQLEIYNQPNQEGPFDVKETEIAVQAKQPDVEEILSKGQHLYKEKPAT
QPVKRKLEDLSSEWKAVNRLLQELRAKQGPASQHFLSTSVQGPWERAISPNKVPYYINHETQTTCWDHPKMTELY
QSLADLNNVRFSAYRTAMKLRRLQKALCLDLLSLSAACDALDQHNLKQNDQPMDILQIINCLTTIYDRLEQEHNN
LVNVPLCVDMCLNWLLNVYDTGRTGRIRVLSFKTGIISLCKAHLEDKYRYLFKQVASSTGFCDQRRLGLLLHDSI
QIPRQLGEVASFGGSNIEPSVRSCFQFANNKPEIEAALFLDWMRLEPQSMVWLPVLHRVAAAETAKHQAKCNICK
ECPIIGFRYRSLKHFNYDICQSCFFSGRVAKGHKMHYPMVEYCTPTTSGEDVRDFAKVLKNKFRTKRYFAKHPRM
GYLPVQTVLEGDNMETPVTLINFWPVDSAPASSPQLSHDDTHSRIEHYASRLAEMENSNGSYLNDSISPNESIDD
EHLLIQHYCQSLNQDSPLSQPRSPAQILISLESEERGELERILADLEEENRNLQAEYDRLKQQHEHKGLSPLPSP
PEMMPTSPQSP
Nterm-R1_R17-R19_H4 to 1st coiled coil and proline rich region that follows:
(SEQ ID NO: 121)
MLWWEEVEDCYEREDVQKKTFTKWVNAQFSKFGKQHIENLFSDLQDGRRLLDLLEGLTGQKLPKEKGSTRVHALN
NVNKALRVLQNNNVDLVNIGSTDIVDGNHKLTLGLIWNIILHWQVKNVMKNIMAGLQQTNSEKILLSWVRQSTRN
YPQVNVINFTTSWSDGLALNALIHSHRPDLFDWNSVVCQQSATQRLEHAFNIARYQLGIEKLLDPEDVDTTYPDK
KSILMYITSLFQVLPQQVSIEAIQEVEMLPRPPKVTKEEHFQLHHQMHYSQQITVSLAQGYERTSSPKPRFKSYA
YTQAAYVTTSDPTRSPFPSQHLEAPEDKSFGSSLMESEVNLDRYQTALEEVLSWLLSAEDTLQAQGEISNDVEVV
KDQFHTHEGYMMDLTAHQGRVGNILQLGSKLIGTGKLSEDEETEVQEQMNLLNSRWECLRVASMEKQSNLHRVLM
DRSVEKWRRFHYDIKIFNQWLTEAEQFLRKTQIPENWEHAKYKWYLKELQDGIGQRQTVVRILNATGEEIIQQSS
KTDASILQEKLGSLNLRWQEVCKQLSDRKKRLEEQKNILSEFQRDLNEFVLWLEEADNIASIPLEPGKEQQLKEK
LEQVKLLVEELPLRQGILKQLNETGGPVLVSAPISPEEQDKLENKLKQTNLQWIKVSRALPEKQGEIEAQIKDLG
QLEKKLEDLEEQLNHLLLWLSPIRNQLEIYNQPNQEGPFDVKETEIAVQAKQPDVEEILSKGQHLYKEKPATQPV
KRKLEDLSSEWKAVNRLLQELRAKQGPASQHFLSTSVQGPWERAISPNKVPYYINHETQTTCWDHPKMTELYQSL
ADLNNVRFSAYRTAMKLRRLQKALCLDLLSLSAACDALDQHNLKQNDQPMDILQIINCLTTIYDRLEQEHNNLVN
VPLCVDMCLNWLLNVYDTGRTGRIRVLSFKTGIISLCKAHLEDKYRYLFKQVASSTGFCDQRRLGLLLHDSIQIP
RQLGEVASFGGSNIEPSVRSCFQFANNKPEIEAALFLDWMRLEPQSMVWLPVLHRVAAAETAKHQAKCNICKECP
IIGFRYRSLKHFNYDICQSCFFSGRVAKGHKMHYPMVEYCTPTTSGEDVRDFAKVLKNKFRTKRYFAKHPRMGYL
PVQTVLEGDNMETPVTLINFWPVDSAPASSPQLSHDDTHSRIEHYASRLAEMENSNGSYLNDSISPNESIDDEHL
LIQHYCQSLNQDSPLSQPRSPAQILISLESEERGELERILADLEEENRNLQAEYDRLKQQHEHKGLSPLPSPPEM
MPTSPQSP
Nterm-R1_R17-R19_H4 to end of syntrophin region:
(SEQ ID NO: 3)
MLWWEEVEDCYEREDVQKKTFTKWVNAQFSKFGKQHIENLFSDLQDGRRLLDLLEGLTGQKLPKEKGSTRVHALN
NVNKALRVLQNNNVDLVNIGSTDIVDGNHKLTLGLIWNIILHWQVKNVMKNIMAGLQQTNSEKILLSWVRQSTRN
YPQVNVINFTTSWSDGLALNALIHSHRPDLFDWNSVVCQQSATQRLEHAFNIARYQLGIEKLLDPEDVDTTYPDK
KSILMYITSLFQVLPQQVSIEAIQEVEMLPRPPKVTKEEHFQLHHQMHYSQQITVSLAQGYERTSSPKPRFKSYA
YTQAAYVTTSDPTRSPFPSQHLEAPEDKSFGSSLMESEVNLDRYQTALEEVLSWLLSAEDTLQAQGEISNDVEVV
KDQFHTHEGYMMDLTAHQGRVGNILQLGSKLIGTGKLSEDEETEVQEQMNLLNSRWECLRVASMEKQSNLHRVLM
DRFDRSVEKWRRFHYDIKIFNQWLTEAEQFLRKTQIPENWEHAKYKWYLKELQDGIGQRQTVVRTLNATGEEIIQ
QSSKTDASILQEKLGSLNLRWQEVCKQLSDRKKRLEEQKNILSEFQRDLNEFVLWLEEADNIASIPLEPGKEQQL
KEKLEQVKLLVEELPLRQGILKQLNETGGPVLVSAPISPEEQDKLENKLKQTNLQWIKVSRALPEKQGEIEAQIK
DLGQLEKKLEDLEEQLNHLLLWLSPIRNQLEIYNQPNQEGPFDVKETEIAVQAKQPDVEEILSKGQHLYKEKPAT
QPVKRKLEDLSSEWKAVNRLLQELRAKQGPASQHFLSTSVQGPWERAISPNKVPYYINHETQTTCWDHPKMTELY
QSLADLNNVRFSAYRTAMKLRRLQKALCLDLLSLSAACDALDQHNLKQNDQPMDILQIINCLTTIYDRLEQEHNN
LVNVPLCVDMCLNWLLNVYDTGRTGRIRVLSFKTGIISLCKAHLEDKYRYLFKQVASSTGFCDQRRLGLLLHDSI
QIPRQLGEVASFGGSNIEPSVRSCFQFANNKPEIEAALFLDWMRLEPQSMVWLPVLHRVAAAETAKHQAKCNICK
ECPIIGFRYRSLKHFNYDICQSCFFSGRVAKGHKMHYPMVEYCTPTTSGEDVRDFAKVLKNKFRTKRYFAKHPRM
GYLPVQTVLEGDNMETPVTLINFWPVDSAPASSPQLSHDDTHSRIEHYASRLAEMENSNGSYLNDSISPNESIDD
EHLLIQHYCQSLNQDSPLSQPRS
Nterm-R1_R17-R19_H4 to end of syntrophin region:
(SEQ ID NO: 122)
MLWWEEVEDCYEREDVQKKTFTKWVNAQFSKFGKQHIENLFSDLQDGRRLLDLLEGLTGQKLPKEKGSTRVHALN
NVNKALRVLQNNNVDLVNIGSTDIVDGNHKLTLGLIWNIILHWQVKNVMKNIMAGLQQTNSEKILLSWVRQSTRN
YPQVNVINFTTSWSDGLALNALIHSHRPDLFDWNSVVCQQSATQRLEHAFNIARYQLGIEKLLDPEDVDTTYPDK
KSILMYITSLFQVLPQQVSIEAIQEVEMLPRPPKVTKEEHFQLHHQMHYSQQITVSLAQGYERTSSPKPRFKSYA
YTQAAYVTTSDPTRSPFPSQHLEAPEDKSFGSSLMESEVNLDRYQTALEEVLSWLLSAEDTLQAQGEISNDVEVV
KDQFHTHEGYMMDLTAHQGRVGNILQLGSKLIGTGKLSEDEETEVQEQMNLLNSRWECLRVASMEKQSNLHRVLM
DRSVEKWRRFHYDIKIFNQWLTEAEQFLRKTQIPENWEHAKYKWYLKELQDGIGQRQTVVRTLNATGEEIIQQSS
KTDASILQEKLGSLNLRWQEVCKQLSDRKKRLEEQKNILSEFQRDLNEFVLWLEEADNIASIPLEPGKEQQLKEK
LEQVKLLVEELPLRQGILKQLNETGGPVLVSAPISPEEQDKLENKLKQTNLQWIKVSRALPEKQGEIEAQIKDLG
QLEKKLEDLEEQLNHLLLWLSPIRNQLEIYNQPNQEGPFDVKETEIAVQAKQPDVEEILSKGQHLYKEKPATQPV
KRKLEDLSSEWKAVNRLLQELRAKQGPASQHFLSTSVQGPWERAISPNKVPYYINHETQTTCWDHPKMTELYQSL
ADLNNVRFSAYRTAMKLRRLQKALCLDLLSLSAACDALDQHNLKQNDQPMDILQIINCLTTIYDRLEQEHNNLVN
VPLCVDMCLNWLLNVYDTGRTGRIRVLSFKTGIISLCKAHLEDKYRYLFKQVASSTGFCDQRRLGLLLHDSIQIP
RQLGEVASFGGSNIEPSVRSCFQFANNKPEIEAALFLDWMRLEPQSMVWLPVLHRVAAAETAKHQAKCNICKECP
IIGFRYRSLKHFNYDICQSCFFSGRVAKGHKMHYPMVEYCTPTTSGEDVRDFAKVLKNKFRTKRYFAKHPRMGYL
PVQTVLEGDNMETPVTLINFWPVDSAPASSPQLSHDDTHSRIEHYASRLAEMENSNGSYLNDSISPNESIDDEHL
LIQHYCQSLNQDSPLSQPRS
N-terminus through R1_R17-R19_R24 to 1st coiled coil and proline rich region that follows:
(SEQ ID NO: 4)
MLWWEEVEDCYEREDVQKKTFTKWVNAQFSKFGKQHIENLFSDLQDGRRLLDLLEGLTGQKLPKEKGSTRVHALN
NVNKALRVLQNNNVDLVNIGSTDIVDGNHKLTLGLIWNIILHWQVKNVMKNIMAGLQQTNSEKILLSWVRQSTRN
YPQVNVINFTTSWSDGLALNALIHSHRPDLFDWNSVVCQQSATQRLEHAFNIARYQLGIEKLLDPEDVDTTYPDK
KSILMYITSLFQVLPQQVSIEAIQEVEMLPRPPKVTKEEHFQLHHQMHYSQQITVSLAQGYERTSSPKPRFKSYA
YTQAAYVTTSDPTRSPFPSQHLEAPEDKSFGSSLMESEVNLDRYQTALEEVLSWLLSAEDTLQAQGEISNDVEVV
KDQFHTHEGYMMDLTAHQGRVGNILQLGSKLIGTGKLSEDEETEVQEQMNLLNSRWECLRVASMEKQSNLHRVLM
DRFDRSVEKWRRFHYDIKIFNQWLTEAEQFLRKTQIPENWEHAKYKWYLKELQDGIGQRQTVVRTLNATGEEIIQ
QSSKTDASILQEKLGSLNLRWQEVCKQLSDRKKRLEEQKNILSEFQRDLNEFVLWLEEADNIASIPLEPGKEQQL
KEKLEQVKLLVEELPLRQGILKQLNETGGPVLVSAPISPEEQDKLENKLKQTNLQWIKVSRALPEKQGEIEAQIK
DLGQLEKKLEDLEEQLNHLLLWLSPIRNQLEIYNQPNQEGPFDVKETEIAVQAKQPDVEEILSKGQHLYKEKPAT
QPVKRKLEDLSSEWKAVNRLLQELRAKQWQRKIDETLERLQELQEATDELDLKLRQAEVIKGSWQPVGDLLIDSL
QDHLEKVKALRGEIAPLKENVSHVNDLARQLTTLGIQLSPYNLSTLEDLNTRWKLLQVAVEDRVRQLHEAHRDFG
PASQHFLSTSVQGPWERAISPNKVPYYINHETQTTCWDHPKMTELYQSLADLNNVRFSAYRTAMKLRRLQKALCL
DLLSLSAACDALDQHNLKQNDQPMDILQIINCLTTIYDRLEQEHNNLVNVPLCVDMCLNWLLNVYDTGRTGRIRV
LSFKTGIISLCKAHLEDKYRYLFKQVASSTGFCDQRRLGLLLHDSIQIPRQLGEVASFGGSNIEPSVRSCFQFAN
NKPEIEAALFLDWMRLEPQSMVWLPVLHRVAAAETAKHQAKCNICKECPIIGFRYRSLKHFNYDICQSCFFSGRV
AKGHKMHYPMVEYCTPTTSGEDVRDFAKVLKNKFRTKRYFAKHPRMGYLPVQTVLEGDNMETPVTLINFWPVDSA
PASSPQLSHDDTHSRIEHYASRLAEMENSNGSYLNDSISPNESIDDEHLLIQHYCQSLNQDSPLSQPRSPAQILI
SLESEERGELERILADLEEENRNLQAEYDRLKQQHEHKGLSPLPSPPEMMPTSPQSP
N-terminus through R1_R17-R19_R24 to 1st coiled coil and proline rich region that follows:
(SEQ ID NO: 123)
MLWWEEVEDCYEREDVQKKTFTKWVNAQFSKFGKQHIENLFSDLQDGRRLLDLLEGLTGQKLPKEKGSTRVHALN
NVNKALRVLQNNNVDLVNIGSTDIVDGNHKLTLGLIWNIILHWQVKNVMKNIMAGLQQTNSEKILLSWVRQSTRN
YPQVNVINFTTSWSDGLALNALIHSHRPDLFDWNSVVCQQSATQRLEHAFNIARYQLGIEKLLDPEDVDTTYPDK
KSILMYITSLFQVLPQQVSIEAIQEVEMLPRPPKVTKEEHFQLHHQMHYSQQITVSLAQGYERTSSPKPRFKSYA
YTQAAYVTTSDPTRSPFPSQHLEAPEDKSFGSSLMESEVNLDRYQTALEEVLSWLLSAEDTLQAQGEISNDVEVV
KDQFHTHEGYMMDLTAHQGRVGNILQLGSKLIGTGKLSEDEETEVQEQMNLLNSRWECLRVASMEKQSNLHRVLM
DRSVEKWRRFHYDIKIFNQWLTEAEQFLRKTQIPENWEHAKYKWYLKELQDGIGQRQTVVRTLNATGEEIIQQSS
KTDASILQEKLGSLNLRWQEVCKQLSDRKKRLEEQKNILSEFQRDLNEFVLWLEEADNIASIPLEPGKEQQLKEK
LEQVKLLVEELPLRQGILKQLNETGGPVLVSAPISPEEQDKLENKLKQTNLQWIKVSRALPEKQGEIEAQIKDLG
QLEKKLEDLEEQLNHLLLWLSPIRNQLEIYNQPNQEGPFDVKETEIAVQAKQPDVEEILSKGQHLYKEKPATQPV
KRKLEDLSSEWKAVNRLLQELRAKQWQRKIDETLERLQELQEATDELDLKLRQAEVIKGSWQPVGDLLIDSLQDH
LEKVKALRGEIAPLKENVSHVNDLARQLTTLGIQLSPYNLSTLEDLNTRWKLLQVAVEDRVRQLHEAHRDFGPAS
QHFLSTSVQGPWERAISPNKVPYYINHETQTTCWDHPKMTELYQSLADLNNVRFSAYRTAMKLRRLQKALCLDLL
SLSAACDALDQHNLKQNDQPMDILQIINCLTTIYDRLEQEHNNLVNVPLCVDMCLNWLLNVYDTGRTGRIRVLSF
KTGIISLCKAHLEDKYRYLFKQVASSTGFCDQRRLGLLLHDSIQIPRQLGEVASFGGSNIEPSVRSCFQFANNKP
EIEAALFLDWMRLEPQSMVWLPVLHRVAAAETAKHQAKCNICKECPIIGFRYRSLKHFNYDICQSCFFSGRVAKG
HKMHYPMVEYCTPTTSGEDVRDFAKVLKNKFRTKRYFAKHPRMGYLPVQTVLEGDNMETPVTLINFWPVDSAPAS
SPQLSHDDTHSRIEHYASRLAEMENSNGSYLNDSISPNESIDDEHLLIQHYCQSLNQDSPLSQPRSPAQILISLE
SEERGELERILADLEEENRNLQAEYDRLKQQHEHKGLSPLPSPPEMMPTSPQSP
N-terminus through R1_R17-R19_H4 to end of dystrophin:
(SEQ ID NO: 5)
MLWWEEVEDCYEREDVQKKTFTKWVNAQFSKFGKQHIENLFSDLQDGRRLLDLLEGLTGQKLPKEKGSTRVHALN
NVNKALRVLQNNNVDLVNIGSTDIVDGNHKLTLGLIWNIILHWQVKNVMKNIMAGLQQTNSEKILLSWVRQSTRN
YPQVNVINFTTSWSDGLALNALIHSHRPDLFDWNSVVCQQSATQRLEHAFNIARYQLGIEKLLDPEDVDTTYPDK
KSILMYITSLFQVLPQQVSIEAIQEVEMLPRPPKVTKEEHFQLHHQMHYSQQITVSLAQGYERTSSPKPRFKSYA
YTQAAYVTTSDPTRSPFPSQHLEAPEDKSFGSSLMESEVNLDRYQTALEEVLSWLLSAEDTLQAQGEISNDVEVV
KDQFHTHEGYMMDLTAHQGRVGNILQLGSKLIGTGKLSEDEETEVQEQMNLLNSRWECLRVASMEKQSNLHRVLM
DRFDRSVEKWRRFHYDIKIFNQWLTEAEQFLRKTQIPENWEHAKYKWYLKELQDGIGQRQTVVRTLNATGEEIIQ
QSSKTDASILQEKLGSLNLRWQEVCKQLSDRKKRLEEQKNILSEFQRDLNEFVLWLEEADNIASIPLEPGKEQQL
KEKLEQVKLLVEELPLRQGILKQLNETGGPVLVSAPISPEEQDKLENKLKQTNLQWIKVSRALPEKQGEIEAQIK
DLGQLEKKLEDLEEQLNHLLLWLSPIRNQLEIYNQPNQEGPFDVKETEIAVQAKQPDVEEILSKGQHLYKEKPAT
QPVKRKLEDLSSEWKAVNRLLQELRAKQGPASQHFLSTSVQGPWERAISPNKVPYYINHETQTTCWDHPKMTELY
QSLADLNNVRFSAYRTAMKLRRLQKALCLDLLSLSAACDALDQHNLKQNDQPMDILQIINCLTTIYDRLEQEHNN
LVNVPLCVDMCLNWLLNVYDTGRTGRIRVLSFKTGIISLCKAHLEDKYRYLFKQVASSTGFCDQRRLGLLLHDSI
QIPRQLGEVASFGGSNIEPSVRSCFQFANNKPEIEAALFLDWMRLEPQSMVWLPVLHRVAAAETAKHQAKCNICK
ECPIIGFRYRSLKHFNYDICQSCFFSGRVAKGHKMHYPMVEYCTPTTSGEDVRDFAKVLKNKFRTKRYFAKHPRM
GYLPVQTVLEGDNMETPVTLINFWPVDSAPASSPQLSHDDTHSRIEHYASRLAEMENSNGSYLNDSISPNESIDD
EHLLIQHYCQSLNQDSPLSQPRSPAQILISLESEERGELERILADLEEENRNLQAEYDRLKQQHEHKGLSPLPSP
PEMMPTSPQSPRDAELIAEAKLLRQHKGRLEARMQILEDHNKQLESQLHRLRQLLEQPQAEAKVNGTTVSSPSTS
LQRSDSSQPMLLRVVGSQTSDSMGEEDLLSPPQDTSTGLEEVMEQLNNSFPSSRGRNTPGKPMREDTM
N-terminus through R1_R17-R19_H4 to end of dystrophin:
(SEQ ID NO: 124)
MLWWEEVEDCYEREDVQKKTFTKWVNAQFSKFGKQHIENLFSDLQDGRRLLDLLEGLTGQKLPKEKGSTRVHALN
NVNKALRVLQNNNVDLVNIGSTDIVDGNHKLTLGLIWNIILHWQVKNVMKNIMAGLQQTNSEKILLSWVRQSTRN
YPQVNVINFTTSWSDGLALNALIHSHRPDLFDWNSVVCQQSATQRLEHAFNIARYQLGIEKLLDPEDVDTTYPDK
KSILMYITSLFQVLPQQVSIEAIQEVEMLPRPPKVTKEEHFQLHHQMHYSQQITVSLAQGYERTSSPKPRFKSYA
YTQAAYVITSDPTRSPFPSQHLEAPEDKSFGSSLMESEVNLDRYQTALEEVLSWLLSAEDTLQAQGEISNDVEVV
KDQFHTHEGYMMDLTAHQGRVGNILQLGSKLIGTGKLSEDEETEVQEQMNLLNSRWECLRVASMEKQSNLHRVLM
DRSVEKWRRFHYDIKIFNQWLTEAEQFLRKTQIPENWEHAKYKWYLKELQDGIGQRQTVVRTLNATGEEIIQQSS
KTDASILQEKLGSLNLRWQEVCKQLSDRKKRLEEQKNILSEFQRDLNEFVLWLEEADNIASIPLEPGKEQQLKEK
LEQVKLLVEELPLRQGILKQLNETGGPVLVSAPISPEEQDKLENKLKQTNLQWIKVSRALPEKQGEIEAQIKDLG
QLEKKLEDLEEQLNHLLLWLSPIRNQLEIYNQPNQEGPFDVKETEIAVQAKQPDVEEILSKGQHLYKEKPATQPV
KRKLEDLSSEWKAVNRLLQELRAKQGPASQHFLSTSVQGPWERAISPNKVPYYINHETQTTCWDHPKMTELYQSL
ADLNNVRFSAYRTAMKLRRLQKALCLDLLSLSAACDALDQHNLKQNDQPMDILQIINCLTTIYDRLEQEHNNLVN
VPLCVDMCLNWLLNVYDTGRTGRIRVLSFKTGIISLCKAHLEDKYRYLFKQVASSTGFCDQRRLGLLLHDSIQIP
RQLGEVASFGGSNIEPSVRSCFQFANNKPEIEAALFLDWMRLEPQSMVWLPVLHRVAAAETAKHQAKCNICKECP
IIGFRYRSLKHFNYDICQSCFFSGRVAKGHKMHYPMVEYCTPTTSGEDVRDFAKVLKNKFRTKRYFAKHPRMGYL
PVQTVLEGDNMETPVTLINFWPVDSAPASSPQLSHDDTHSRIEHYASRLAEMENSNGSYLNDSISPNESIDDEHL
LIQHYCQSLNQDSPLSQPRSPAQILISLESEERGELERILADLEEENRNLQAEYDRLKQQHEHKGLSPLPSPPEM
MPTSPQSPRDAELIAEAKLLRQHKGRLEARMQILEDHNKQLESQLHRLRQLLEQPQAEAKVNGTTVSSPSTSLQR
SDSSQPMLLRVVGSQTSDSMGEEDLLSPPQDTSTGLEEVMEQLNNSFPSSRGRNTPGKPMREDTM
N-terminus through R1_R17-R19_R24 to end of dystrophin:
(SEQ ID NO: 6)
MLWWEEVEDCYEREDVQKKTFTKWVNAQFSKFGKQHIENLFSDLQDGRRLLDLLEGLTGQKLPKEKGSTRVHALN
NVNKALRVLQNNNVDLVNIGSTDIVDGNHKLTLGLIWNIILHWQVKNVMKNIMAGLQQTNSEKILLSWVRQSTRN
YPQVNVINFTTSWSDGLALNALIHSHRPDLFDWNSVVCQQSATQRLEHAFNIARYQLGIEKLLDPEDVDTTYPDK
KSILMYITSLFQVLPQQVSIEAIQEVEMLPRPPKVTKEEHFQLHHQMHYSQQITVSLAQGYERTSSPKPRFKSYA
YTQAAYVTTSDPTRSPFPSQHLEAPEDKSFGSSLMESEVNLDRYQTALEEVLSWLLSAEDTLQAQGEISNDVEVV
KDQFHTHEGYMMDLTAHQGRVGNILQLGSKLIGTGKLSEDEETEVQEQMNLLNSRWECLRVASMEKQSNLHRVLM
DRFDRSVEKWRRFHYDIKIFNQWLTEAEQFLRKTQIPENWEHAKYKWYLKELQDGIGQRQTVVRTLNATGEEIIQ
QSSKTDASILQEKLGSLNLRWQEVCKQLSDRKKRLEEQKNILSEFQRDLNEFVLWLEEADNIASIPLEPGKEQQL
KEKLEQVKLLVEELPLRQGILKQLNETGGPVLVSAPISPEEQDKLENKLKQTNLQWIKVSRALPEKQGEIEAQIK
DLGQLEKKLEDLEEQLNHLLLWLSPIRNQLEIYNQPNQEGPFDVKETEIAVQAKQPDVEEILSKGQHLYKEKPAT
QPVKRKLEDLSSEWKAVNRLLQELRAKQWQRKIDETLERLQELQEATDELDLKLRQAEVIKGSWQPVGDLLIDSL
QDHLEKVKALRGEIAPLKENVSHVNDLARQLTTLGIQLSPYNLSTLEDLNTRWKLLQVAVEDRVRQLHEAHRDFG
PASQHFLSTSVQGPWERAISPNKVPYYINHETQTTCWDHPKMTELYQSLADLNNVRFSAYRTAMKLRRLQKALCL
DLLSLSAACDALDQHNLKQNDQPMDILQIINCLTTIYDRLEQEHNNLVNVPLCVDMCLNWLLNVYDTGRTGRIRV
LSFKTGIISLCKAHLEDKYRYLFKQVASSTGFCDQRRLGLLLHDSIQIPRQLGEVASFGGSNIEPSVRSCFQFAN
NKPEIEAALFLDWMRLEPQSMVWLPVLHRVAAAETAKHQAKCNICKECPIIGFRYRSLKHFNYDICQSCFFSGRV
AKGHKMHYPMVEYCTPTTSGEDVRDFAKVLKNKFRTKRYFAKHPRMGYLPVQTVLEGDNMETPVTLINFWPVDSA
PASSPQLSHDDTHSRIEHYASRLAEMENSNGSYLNDSISPNESIDDEHLLIQHYCQSLNQDSPLSQPRSPAQILI
SLESEERGELERILADLEEENRNLQAEYDRLKQQHEHKGLSPLPSPPEMMPTSPQSPRDAELIAEAKLLRQHKGR
LEARMQILEDHNKQLESQLHRLRQLLEQPQAEAKVNGTTVSSPSTSLQRSDSSQPMLLRVVGSQTSDSMGEEDLL
SPPQDTSTGLEEVMEQLNNSFPSSRGRNTPGKPMREDTM
N-terminus through R1_R17-R19_R24 to end of dystrophin:
(SEQ ID NO: 125)
MLWWEEVEDCYEREDVQKKTFTKWVNAQFSKFGKQHIENLFSDLQDGRRLLDLLEGLTGQKLPKEKGSTRVHALN
NVNKALRVLQNNNVDLVNIGSTDIVDGNHKLTLGLIWNIILHWQVKNVMKNIMAGLQQTNSEKILLSWVRQSTRN
YPQVNVINFTTSWSDGLALNALIHSHRPDLFDWNSVVCQQSATQRLEHAFNIARYQLGIEKLLDPEDVDTTYPDK
KSILMYITSLFQVLPQQVSIEAIQEVEMLPRPPKVTKEEHFQLHHQMHYSQQITVSLAQGYERTSSPKPRFKSYA
YTQAAYVTTSDPTRSPFPSQHLEAPEDKSFGSSLMESEVNLDRYQTALEEVLSWLLSAEDTLQAQGEISNDVEVV
KDQFHTHEGYMMDLTAHQGRVGNILQLGSKLIGTGKLSEDEETEVQEQMNLLNSRWECLRVASMEKQSNLHRVLM
DRSVEKWRRFHYDIKIFNQWLTEAEQFLRKTQIPENWEHAKYKWYLKELQDGIGQRQTVVRTLNATGEEIIQQSS
KTDASILQEKLGSLNLRWQEVCKQLSDRKKRLEEQKNILSEFQRDLNEFVLWLEEADNIASIPLEPGKEQQLKEK
LEQVKLLVEELPLRQGILKQLNETGGPVLVSAPISPEEQDKLENKLKQTNLQWIKVSRALPEKQGEIEAQIKDLG
QLEKKLEDLEEQLNHLLLWLSPIRNQLEIYNQPNQEGPFDVKETEIAVQAKQPDVEEILSKGQHLYKEKPATQPV
KRKLEDLSSEWKAVNRLLQELRAKQWQRKIDETLERLQELQEATDELDLKLRQAEVIKGSWQPVGDLLIDSLQDH
LEKVKALRGEIAPLKENVSHVNDLARQLTTLGIQLSPYNLSTLEDLNTRWKLLQVAVEDRVRQLHEAHRDFGPAS
QHFLSTSVQGPWERAISPNKVPYYINHETQTTCWDHPKMTELYQSLADLNNVRFSAYRTAMKLRRLQKALCLDLL
SLSAACDALDQHNLKQNDQPMDILQIINCLTTIYDRLEQEHNNLVNVPLCVDMCLNWLLNVYDTGRTGRIRVLSF
KTGIISLCKAHLEDKYRYLFKQVASSTGFCDQRRLGLLLHDSIQIPRQLGEVASFGGSNIEPSVRSCFQFANNKP
EIEAALFLDWMRLEPQSMVWLPVLHRVAAAETAKHQAKCNICKECPIIGFRYRSLKHFNYDICQSCFFSGRVAKG
HKMHYPMVEYCTPTTSGEDVRDFAKVLKNKFRTKRYFAKHPRMGYLPVQTVLEGDNMETPVTLINFWPVDSAPAS
SPQLSHDDTHSRIEHYASRLAEMENSNGSYLNDSISPNESIDDEHLLIQHYCQSLNQDSPLSQPRSPAQILISLE
SEERGELERILADLEEENRNLQAEYDRLKQQHEHKGLSPLPSPPEMMPTSPQSPRDAELIAEAKLLRQHKGRLEA
RMQILEDHNKQLESQLHRLRQLLEQPQAEAKVNGTTVSSPSTSLQRSDSSQPMLLRVVGSQTSDSMGEEDLLSPP
QDTSTGLEEVMEQLNNSFPSSRGRNTPGKPMREDTM

### Skeletal Muscle Micro-Dystrophins

[0091] The present disclosure provides micro-dystrophin genes and proteins optimized for skeletal muscle. The inventors have found that certain combinations of domains from full-length dystrophin are beneficial for skeletal muscle.

[0092] In some embodiments, a micro-dystrophin protein optimized for skeletal muscle does not comprise spectrin-like repeat 2 and/or spectrin-like repeat 3 of dystrophin. In some embodiments, a micro-dystrophin protein does not comprise spectrin-like repeat 2. In some embodiments, a micro-dystrophin protein does not comprise spectrin-like repeat 3. In some embodiments, a micro-dystrophin protein does not comprise spectrin-like repeat 2 and spectrin-like repeat 3.

[0093] In some embodiments, a micro-dystrophin protein comprises optimized for skeletal muscle spectrin-like repeat 1 and spectrin-like repeat 2. In some embodiments, a micro-dystrophin protein optimized for skeletal muscle comprises spectrin-like repeat 1, spectrin-like repeat 2, and spectrin-like repeat 3.

[0094] In some embodiments, a micro-dystrophin protein optimized for skeletal muscle comprises an amino-terminal actin-binding domain, hinge domain 1, spectrin-like repeat 1, spectrin-like repeat 2, spectrin-like repeat 16, and spectrin-like repeat 17 of dystrophin. In some embodiments, the micro-dystrophin protein does not comprise spectrin-like repeat 3 of dystrophin. In some embodiments, the micro-dystrophin protein comprises spectrin-like repeat 3 of dystrophin.

[0095] In some embodiments, a micro-dystrophin protein optimized for skeletal muscle comprises one or more of: spectrin-like repeat 23, spectrin-like repeat 24, hinge domain 4, and the dystroglycan binding site of dystrophin. In some embodiments, a micro-dystrophin protein optimized for skeletal muscle comprises spectrin-like repeat 23 and spectrin-like repeat 24. In some embodiments, a micro-dystrophin protein optimized for skeletal muscle comprises spectrin-like repeat 23 and hinge domain 4. In some embodiments, a micro-dystrophin protein optimized for skeletal muscle comprises spectrin-like repeat 23 and the dystroglycan binding site. In some embodiments, a micro-dystrophin protein optimized for skeletal muscle comprises spectrin-like repeat 24 and hinge domain 4. In some embodiments, a micro-dystrophin protein optimized for skeletal muscle comprises spectrin-like repeat 24 and the dystroglycan binding site. In some embodiments, a micro-dystrophin protein optimized for skeletal muscle comprises hinge domain 4 and the dystroglycan binding site. In some embodiments, a micro-dystrophin protein optimized for skeletal muscle comprises spectrin-like repeat 23, spectrin-like repeat 24 and hinge domain 4. In some embodiments, a micro-dystrophin protein optimized for skeletal muscle comprises spectrin-like repeat 23, spectrin-like repeat 24 and the dystroglycan binding site. In some embodiments, a micro-dystrophin protein optimized for skeletal muscle comprises spectrin-like repeat 23, hinge domain 4, and the dystroglycan binding site. In some embodiments, a micro-dystrophin protein optimized for skeletal muscle comprises spectrin-like repeat 24, hinge domain 4, and the dystroglycan binding site. In some embodiments, a micro-dystrophin protein optimized for skeletal muscle comprises spectrin-like repeat 23, spectrin-like repeat 24, hinge domain 4, and the dystroglycan binding site.

[0096] In some embodiments, a micro-dystrophin protein optimized for skeletal muscle comprises one or more syntrophin binding domains of dystrophin.

[0097] In some embodiments, a micro-dystrophin protein optimized for skeletal muscle comprises one or more coiled coil domains of dystrophin.

[0098] In some embodiments, a micro-dystrophin protein optimized for skeletal muscle comprises spectrin-like repeat 2 directly coupled to spectrin like repeat 16.

[0099] In some embodiments, a micro-dystrophin protein optimized for skeletal muscle comprises spectrin-like repeat 2 directly coupled to spectrin like repeat 23.

[0100] In some embodiments, a micro-dystrophin protein optimized for skeletal muscle comprises spectrin-like repeat 1 directly coupled spectrin-like repeat 15.

[0101] In some embodiments, a micro-dystrophin protein optimized for skeletal muscle comprises spectrin-like repeat 17 directly coupled to spectrin-like repeat 24. In some embodiments, a micro-dystrophin protein optimized for skeletal muscle comprises spectrin-like repeat 17 directly coupled to hinge domain 4.

[0102] In some embodiments, a micro-dystrophin protein optimized for skeletal muscle comprises the region of dystrophin that is C-terminal to the cysteine-rich portion of the C-terminal region (FIG. 2). In some embodiments, a micro-dystrophin optimized for skeletal muscle comprises region of dystrophin that is C-terminal to the dystroglycan binding site of dystrophin.

[0103] In some embodiments, a micro-dystrophin protein optimized for skeletal muscle comprises the region of dystrophin from spectrin-like repeat 24 to the C-terminus. In some embodiments, a micro-dystrophin protein optimized for skeletal muscle comprises the region of dystrophin from spectrin-like repeat 24 to the end of the proline rich region following the first coiled coil domain.

[0104] In some embodiments, a micro-dystrophin protein optimized for skeletal muscle comprises the region of dystrophin from hinge domain 4 to the C-terminus. In some embodiments, a micro-dystrophin protein optimized for skeletal muscle comprises the region of dystrophin from hinge domain 4 to the end of the proline rich region following the first coiled coil domain. In some embodiments, a micro-dystrophin protein optimized for skeletal muscle comprises the region of dystrophin from hinge domain 4 to the end of the second syntrophin binding domain.

[0105] Non-limiting examples of human micro-dystrophin proteins optimized for skeletal muscle are described below.

Nterm-R2_R16-R17_R24 + H4 + trCterm:
(SEQ ID NO: 13)
MLWWEEVEDCYEREDVQKKTFTKWVNAQFSKFGKQHIENLFSDLQDGRRLLDLLEGLTGQKLPKEKGSTRVHALN
NVNKALRVLQNNNVDLVNIGSTDIVDGNHKLTLGLIWNIILHWQVKNVMKNIMAGLQQTNSEKILLSWVRQSTRN
YPQVNVINFTTSWSDGLALNALIHSHRPDLFDWNSVVCQQSATQRLEHAFNIARYQLGIEKLLDPEDVDTTYPDK
KSILMYITSLFQVLPQQVSIEAIQEVEMLPRPPKVTKEEHFQLHHQMHYSQQITVSLAQGYERTSSPKPRFKSYA
YTQAAYVTTSDPTRSPFPSQHLEAPEDKSFGSSLMESEVNLDRYQTALEEVLSWLLSAEDTLQAQGEISNDVEVV
KDQFHTHEGYMMDLTAHQGRVGNILQLGSKLIGTGKLSEDEETEVQEQMNLLNSRWECLRVASMEKQSNLHRVLM
DLQNQKLKELNDWLTKTEERTRKMEEEPLGPDLEDLKRQVQQHKVLQEDLEQEQVRVNSLTHMVVVVDESSGDHA
TAALEEQLKVLGDRWANICRWTEDRWVLLQDHTVREETMMVMTEDMPLEISYVPSTYLTEITHVSQALLEVEQLL
NAPDLCAKDFEDLFKQEESLKNIKDSLQQSSGRIDIIHSKKTAALQSATPVERVKLQEALSQLDFQWEKVNKMYK
DRQGRFDRSVEKWRRFHYDIKIFNQWLTEAEQFLRKTQIPENWEHAKYKWYLKELQDGIGQRQTVVRTLNATGEE
IIQQSSKTDASILQEKLGSLNLRWQEVCKQLSDRKKRLEEQKWQRKIDETLERLQELQEATDELDLKLRQAEVIK
GSWQPVGDLLIDSLQDHLEKVKALRGEIAPLKENVSHVNDLARQLTTLGIQLSPYNLSTLEDLNTRWKLLQVAVE
DRVRQLHEAHRDFGPASQHFLSTSVQGPWERAISPNKVPYYINHETQTTCWDHPKMTELYQSLADLNNVRFSAYR
TAMKLRRLQKALCLDLLSLSAACDALDQHNLKQNDQPMDILQIINCLTTIYDRLEQEHNNLVNVPLCVDMCLNWL
LNVYDTGRTGRIRVLSFKTGIISLCKAHLEDKYRYLFKQVASSTGFCDQRRLGLLLHDSIQIPRQLGEVASFGGS
NIEPSVRSCFQFANNKPEIEAALFLDWMRLEPQSMVWLPVLHRVAAAETAKHQAKCNICKECPIIGFRYRSLKHF
NYDICQSCFFSGRVAKGHKMHYPMVEYCTPTTSGEDVRDFAKVLKNKFRTKRYFAKHPRMGYLPVQTVLEGDNME
TP
Nterm-R2_R16-R17_H4 to end of syntrophin region:
(SEQ ID NO: 14)
MLWWEEVEDCYEREDVQKKTFTKWVNAQFSKFGKQHIENLFSDLQDGRRLLDLLEGLTGQKLPKEKGSTRVHALN
NVNKALRVLQNNNVDLVNIGSTDIVDGNHKLTLGLIWNIILHWQVKNVMKNIMAGLQQTNSEKILLSWVRQSTRN
YPQVNVINFTTSWSDGLALNALIHSHRPDLFDWNSVVCQQSATQRLEHAFNIARYQLGIEKLLDPEDVDTTYPDK
KSILMYITSLFQVLPQQVSIEAIQEVEMLPRPPKVTKEEHFQLHHQMHYSQQITVSLAQGYERTSSPKPRFKSYA
YTQAAYVTTSDPTRSPFPSQHLEAPEDKSFGSSLMESEVNLDRYQTALEEVLSWLLSAEDTLQAQGEISNDVEVV
KDQFHTHEGYMMDLTAHQGRVGNILQLGSKLIGTGKLSEDEETEVQEQMNLLNSRWECLRVASMEKQSNLHRVLM
DLQNQKLKELNDWLTKTEERTRKMEEEPLGPDLEDLKRQVQQHKVLQEDLEQEQVRVNSLTHMVVVVDESSGDHA
TAALEEQLKVLGDRWANICRWTEDRWVLLQDHTVREETMMVMTEDMPLEISYVPSTYLTEITHVSQALLEVEQLL
NAPDLCAKDFEDLFKQEESLKNIKDSLQQSSGRIDIIHSKKTAALQSATPVERVKLQEALSQLDFQWEKVNKMYK
DRQGRFDRSVEKWRRFHYDIKIFNQWLTEAEQFLRKTQIPENWEHAKYKWYLKELQDGIGQRQTVVRTLNATGEE
IIQQSSKTDASILQEKLGSLNLRWQEVCKQLSDRKKRLEEQKGPASQHFLSTSVQGPWERAISPNKVPYYINHET
QTTCWDHPKMTELYQSLADLNNVRFSAYRTAMKLRRLQKALCLDLLSLSAACDALDQHNLKQNDQPMDILQIINC
LTTIYDRLEQEHNNLVNVPLCVDMCLNWLLNVYDTGRTGRIRVLSFKTGIISLCKAHLEDKYRYLFKQVASSTGF
CDQRRLGLLLHDSIQIPRQLGEVASFGGSNIEPSVRSCFQFANNKPEIEAALFLDWMRLEPQSMVWLPVLHRVAA
AETAKHQAKCNICKECPIIGFRYRSLKHFNYDICQSCFFSGRVAKGHKMHYPMVEYCTPTTSGEDVRDFAKVLKN
KFRTKRYFAKHPRMGYLPVQTVLEGDNMETPVTLINFWPVDSAPASSPQLSHDDTHSRIEHYASRLAEMENSNGS
YLNDSISPNESIDDEHLLIQHYCQSLNQDSPLSQPRS
Nterm-R2_R16-R17_H4 to 1st coiled coil and proline rich region that follows:
(SEQ ID NO: 15)
MLWWEEVEDCYEREDVQKKTFTKWVNAQFSKFGKQHIENLFSDLQDGRRLLDLLEGLTGQKLPKEKGSTRVHALN
NVNKALRVLQNNNVDLVNIGSTDIVDGNHKLTLGLIWNIILHWQVKNVMKNIMAGLQQTNSEKILLSWVRQSTRN
YPQVNVINFTTSWSDGLALNALIHSHRPDLFDWNSVVCQQSATQRLEHAFNIARYQLGIEKLLDPEDVDTTYPDK
KSILMYITSLFQVLPQQVSIEAIQEVEMLPRPPKVTKEEHFQLHHQMHYSQQITVSLAQGYERTSSPKPRFKSYA
YTQAAYVTTSDPTRSPFPSQHLEAPEDKSFGSSLMESEVNLDRYQTALEEVLSWLLSAEDTLQAQGEISNDVEVV
KDQFHTHEGYMMDLTAHQGRVGNILQLGSKLIGTGKLSEDEETEVQEQMNLLNSRWECLRVASMEKQSNLHRVLM
DLQNQKLKELNDWLTKTEERTRKMEEEPLGPDLEDLKRQVQQHKVLQEDLEQEQVRVNSLTHMVVVVDESSGDHA
TAALEEQLKVLGDRWANICRWTEDRWVLLQDHTVREETMMVMTEDMPLEISYVPSTYLTEITHVSQALLEVEQLL
NAPDLCAKDFEDLFKQEESLKNIKDSLQQSSGRIDIIHSKKTAALQSATPVERVKLQEALSQLDFQWEKVNKMYK
DRQGRFDRSVEKWRRFHYDIKIFNQWLTEAEQFLRKTQIPENWEHAKYKWYLKELQDGIGQRQTVVRTLNATGEE
IIQQSSKTDASILQEKLGSLNLRWQEVCKQLSDRKKRLEEQKGPASQHFLSTSVQGPWERAISPNKVPYYINHET
QTTCWDHPKMTELYQSLADLNNVRFSAYRTAMKLRRLQKALCLDLLSLSAACDALDQHNLKQNDQPMDILQIINC
LTTIYDRLEQEHNNLVNVPLCVDMCLNWLLNVYDTGRTGRIRVLSFKTGIISLCKAHLEDKYRYLFKQVASSTGF
CDQRRLGLLLHDSIQIPRQLGEVASFGGSNIEPSVRSCFQFANNKPEIEAALFLDWMRLEPQSMVWLPVLHRVAA
AETAKHQAKCNICKECPIIGFRYRSLKHFNYDICQSCFFSGRVAKGHKMHYPMVEYCTPTTSGEDVRDFAKVLKN
KFRTKRYFAKHPRMGYLPVQTVLEGDNMETPVTLINFWPVDSAPASSPQLSHDDTHSRIEHYASRLAEMENSNGS
YLNDSISPNESIDDEHLLIQHYCQSLNQDSPLSQPRSPAQILISLESEERGELERILADLEEENRNLQAEYDRLK
QQHEHKGLSPLPSPPEMMPTSPQSP
Nterm-R2_R16-R17_R24 to 1st coiled coil and proline rich region that follows:
(SEQ ID NO: 16)
MLWWEEVEDCYEREDVQKKTFTKWVNAQFSKFGKQHIENLFSDLQDGRRLLDLLEGLTGQKLPKEKGSTRVHALN
NVNKALRVLQNNNVDLVNIGSTDIVDGNHKLTLGLIWNIILHWQVKNVMKNIMAGLQQTNSEKILLSWVRQSTRN
YPQVNVINFTTSWSDGLALNALIHSHRPDLFDWNSVVCQQSATQRLEHAFNIARYQLGIEKLLDPEDVDTTYPDK
KSILMYITSLFQVLPQQVSIEAIQEVEMLPRPPKVTKEEHFQLHHQMHYSQQITVSLAQGYERTSSPKPRFKSYA
YTQAAYVTTSDPTRSPFPSQHLEAPEDKSFGSSLMESEVNLDRYQTALEEVLSWLLSAEDTLQAQGEISNDVEVV
KDQFHTHEGYMMDLTAHQGRVGNILQLGSKLIGTGKLSEDEETEVQEQMNLLNSRWECLRVASMEKQSNLHRVLM
DLQNQKLKELNDWLTKTEERTRKMEEEPLGPDLEDLKRQVQQHKVLQEDLEQEQVRVNSLTHMVVVVDESSGDHA
TAALEEQLKVLGDRWANICRWTEDRWVLLQDHTVREETMMVMTEDMPLEISYVPSTYLTEITHVSQALLEVEQLL
NAPDLCAKDFEDLFKQEESLKNIKDSLQQSSGRIDIIHSKKTAALQSATPVERVKLQEALSQLDFQWEKVNKMYK
DRQGRFDRSVEKWRRFHYDIKIFNQWLTEAEQFLRKTQIPENWEHAKYKWYLKELQDGIGQRQTVVRTLNATGEE
IIQQSSKTDASILQEKLGSLNLRWQEVCKQLSDRKKRLEEQKWQRKIDETLERLQELQEATDELDLKLRQAEVIK
GSWQPVGDLLIDSLQDHLEKVKALRGEIAPLKENVSHVNDLARQLTTLGIQLSPYNLSTLEDLNTRWKLLQVAVE
DRVRQLHEAHRDFGPASQHFLSTSVQGPWERAISPNKVPYYINHETQTTCWDHPKMTELYQSLADLNNVRFSAYR
TAMKLRRLQKALCLDLLSLSAACDALDQHNLKQNDQPMDILQIINCLTTIYDRLEQEHNNLVNVPLCVDMCLNWL
LNVYDTGRTGRIRVLSFKTGIISLCKAHLEDKYRYLFKQVASSTGFCDQRRLGLLLHDSIQIPRQLGEVASFGGS
NIEPSVRSCFQFANNKPEIEAALFLDWMRLEPQSMVWLPVLHRVAAAETAKHQAKCNICKECPIIGFRYRSLKHF
NYDICQSCFFSGRVAKGHKMHYPMVEYCTPTTSGEDVRDFAKVLKNKFRTKRYFAKHPRMGYLPVQTVLEGDNME
TPVTLINFWPVDSAPASSPQLSHDDTHSRIEHYASRLAEMENSNGSYLNDSISPNESIDDEHLLIQHYCQSLNQD
SPLSQPRSPAQILISLESEERGELERILADLEEENRNLQAEYDRLKQQHEHKGLSPLPSPPEMMPTSPQSP
Nterm-R2_R23_R24 to end of dystrophin:
(SEQ ID NO: 17)
MLWWEEVEDCYEREDVQKKTFTKWVNAQFSKFGKQHIENLFSDLQDGRRLLDLLEGLTGQKLPKEKGSTRVHALN
NVNKALRVLQNNNVDLVNIGSTDIVDGNHKLTLGLIWNIILHWQVKNVMKNIMAGLQQTNSEKILLSWVRQSTRN
YPQVNVINFTTSWSDGLALNALIHSHRPDLFDWNSVVCQQSATQRLEHAFNIARYQLGIEKLLDPEDVDTTYPDK
KSILMYITSLFQVLPQQVSIEAIQEVEMLPRPPKVTKEEHFQLHHQMHYSQQITVSLAQGYERTSSPKPRFKSYA
YTQAAYVTTSDPTRSPFPSQHLEAPEDKSFGSSLMESEVNLDRYQTALEEVLSWLLSAEDTLQAQGEISNDVEVV
KDQFHTHEGYMMDLTAHQGRVGNILQLGSKLIGTGKLSEDEETEVQEQMNLLNSRWECLRVASMEKQSNLHRVLM
DLQNQKLKELNDWLTKTEERTRKMEEEPLGPDLEDLKRQVQQHKVLQEDLEQEQVRVNSLTHMVVVVDESSGDHA
TAALEEQLKVLGDRWANICRWTEDRWVLLQDHLSLQELLVWLQLKDDELSRQAPIGGDFPAVQKQNDVHRAFKRE
LKTKEPVIMSTLETVRIFLTEQPLEGLEKLYQEPRELPPEERAQNVTRLLRKQAEEVNTEWEKLNLHSADWQRKI
DETLERLQELQEATDELDLKLRQAEVIKGSWQPVGDLLIDSLQDHLEKVKALRGEIAPLKENVSHVNDLARQLTT
LGIQLSPYNLSTLEDLNTRWKLLQVAVEDRVRQLHEAHRDFGPASQHFLSTSVQGPWERAISPNKVPYYINHETQ
TTCWDHPKMTELYQSLADLNNVRFSAYRTAMKLRRLQKALCLDLLSLSAACDALDQHNLKQNDQPMDILQIINCL
TTIYDRLEQEHNNLVNVPLCVDMCLNWLLNVYDTGRTGRIRVLSFKTGIISLCKAHLEDKYRYLFKQVASSTGFC
DQRRLGLLLHDSIQIPRQLGEVASFGGSNIEPSVRSCFQFANNKPEIEAALFLDWMRLEPQSMVWLPVLHRVAAA
ETAKHQAKCNICKECPIIGFRYRSLKHFNYDICQSCFFSGRVAKGHKMHYPMVEYCTPTTSGEDVRDFAKVLKNK
FRTKRYFAKHPRMGYLPVQTVLEGDNMETPVTLINFWPVDSAPASSPQLSHDDTHSRIEHYASRLAEMENSNGSY
LNDSISPNESIDDEHLLIQHYCQSLNQDSPLSQPRSPAQILISLESEERGELERILADLEEENRNLQAEYDRLKQ
QHEHKGLSPLPSPPEMMPTSPQSPRDAELIAEAKLLRQHKGRLEARMQILEDHNKQLESQLHRLRQLLEQPQAEA
KVNGTTVSSPSTSLQRSDSSQPMLLRVVGSQTSDSMGEEDLLSPPQDTSTGLEEVMEQLNNSFPSSRGRNTPGKP
MREDTM
Nterm-R2_R23_R24 to end of dystrophin:
(SEQ ID NO: 132)
MLWWEEVEDCYEREDVQKKTFTKWVNAQFSKFGKQHIENLFSDLQDGRRLLDLLEGLTGQKLPKEKGSTRVHALN
NVNKALRVLQNNNVDLVNIGSTDIVDGNHKLTLGLIWNIILHWQVKNVMKNIMAGLQQTNSEKILLSWVRQSTRN
YPQVNVINFTTSWSDGLALNALIHSHRPDLFDWNSVVCQQSATQRLEHAFNIARYQLGIEKLLDPEDVDTTYPDK
KSILMYITSLFQVLPQQVSIEAIQEVEMLPRPPKVTKEEHFQLHHQMHYSQQITVSLAQGYERTSSPKPRFKSYA
YTQAAYVTTSDPTRSPFPSQHLEAPEDKSFGSSLMESEVNLDRYQTALEEVLSWLLSAEDTLQAQGEISNDVEVV
KDQFHTHEGYMMDLTAHQGRVGNILQLGSKLIGTGKLSEDEETEVQEQMNLLNSRWECLRVASMEKQSNLHRVLM
DLQNQKLKELNDWLTKTEERTRKMEEEPLGPDLEDLKRQVQQHKVLQEDLEQEQVRVNSLTHMVVVVDESSGDHA
TAALEEQLKVLGDRWANICRWTEDRWVLLQDASSDQWKRLHLSLQELLVWLQLKDDELSRQAPIGGDFPAVQKQN
DVHRAFKRELKTKEPVIMSTLETVRIFLTEQPLEGLEKLYQEPRELPPEERAQNVTRLLRKQAEEVNTEWEKLNL
HSADWQRKIDETLERLQELQEATDELDLKLRQAEVIKGSWQPVGDLLIDSLQDHLEKVKALRGEIAPLKENVSHV
NDLARQLTTLGIQLSPYNLSTLEDLNTRWKLLQVAVEDRVRQLHEAHRDFGPASQHFLSTSVQGPWERAISPNKV
PYYINHETQTTCWDHPKMTELYQSLADLNNVRFSAYRTAMKLRRLQKALCLDLLSLSAACDALDQHNLKQNDQPM
DILQIINCLTTIYDRLEQEHNNLVNVPLCVDMCLNWLLNVYDTGRTGRIRVLSFKTGIISLCKAHLEDKYRYLFK
QVASSTGFCDQRRLGLLLHDSIQIPRQLGEVASFGGSNIEPSVRSCFQFANNKPEIEAALFLDWMRLEPQSMVWL
PVLHRVAAAETAKHQAKCNICKECPIIGFRYRSLKHFNYDICQSCFFSGRVAKGHKMHYPMVEYCTPTTSGEDVR
DFAKVLKNKFRTKRYFAKHPRMGYLPVQTVLEGDNMETPVTLINFWPVDSAPASSPQLSHDDTHSRIEHYASRLA
EMENSNGSYLNDSISPNESIDDEHLLIQHYCQSLNQDSPLSQPRSPAQILISLESEERGELERILADLEEENRNL
QAEYDRLKQQHEHKGLSPLPSPPEMMPTSPQSPRDAELIAEAKLLRQHKGRLEARMQILEDHNKQLESQLHRLRQ
LLEQPQAEAKVNGTTVSSPSTSLQRSDSSQPMLLRVVGSQTSDSMGEEDLLSPPQDTSTGLEEVMEQLNNSFPSS
RGRNTPGKPMREDTM
Nterm-R2_R16-R17_H4 to end:
(SEQ ID NO: 18)
MLWWEEVEDCYEREDVQKKTFTKWVNAQFSKFGKQHIENLFSDLQDGRRLLDLLEGLTGQKLPKEKGSTRVHALN
NVNKALRVLQNNNVDLVNIGSTDIVDGNHKLTLGLIWNIILHWQVKNVMKNIMAGLQQTNSEKILLSWVRQSTRN
YPQVNVINFTTSWSDGLALNALIHSHRPDLFDWNSVVCQQSATQRLEHAFNIARYQLGIEKLLDPEDVDTTYPDK
KSILMYITSLFQVLPQQVSIEAIQEVEMLPRPPKVTKEEHFQLHHQMHYSQQITVSLAQGYERTSSPKPRFKSYA
YTQAAYVTTSDPTRSPFPSQHLEAPEDKSFGSSLMESEVNLDRYQTALEEVLSWLLSAEDTLQAQGEISNDVEVV
KDQFHTHEGYMMDLTAHQGRVGNILQLGSKLIGTGKLSEDEETEVQEQMNLLNSRWECLRVASMEKQSNLHRVLM
DLQNQKLKELNDWLTKTEERTRKMEEEPLGPDLEDLKRQVQQHKVLQEDLEQEQVRVNSLTHMVVVVDESSGDHA
TAALEEQLKVLGDRWANICRWTEDRWVLLQDHTVREETMMVMTEDMPLEISYVPSTYLTEITHVSQALLEVEQLL
NAPDLCAKDFEDLFKQEESLKNIKDSLQQSSGRIDIIHSKKTAALQSATPVERVKLQEALSQLDFQWEKVNKMYK
DRQGRFDRSVEKWRRFHYDIKIFNQWLTEAEQFLRKTQIPENWEHAKYKWYLKELQDGIGQRQTVVRTLNATGEE
IIQQSSKTDASILQEKLGSLNLRWQEVCKQLSDRKKRLEEQKGPASQHFLSTSVQGPWERAISPNKVPYYINHET
QTTCWDHPKMTELYQSLADLNNVRFSAYRTAMKLRRLQKALCLDLLSLSAACDALDQHNLKQNDQPMDILQIINC
LTTIYDRLEQEHNNLVNVPLCVDMCLNWLLNVYDTGRTGRIRVLSFKTGIISLCKAHLEDKYRYLFKQVASSTGF
CDQRRLGLLLHDSIQIPRQLGEVASFGGSNIEPSVRSCFQFANNKPEIEAALFLDWMRLEPQSMVWLPVLHRVAA
AETAKHQAKCNICKECPIIGFRYRSLKHFNYDICQSCFFSGRVAKGHKMHYPMVEYCTPTTSGEDVRDFAKVLKN
KFRTKRYFAKHPRMGYLPVQTVLEGDNMETPVTLINFWPVDSAPASSPQLSHDDTHSRIEHYASRLAEMENSNGS
YLNDSISPNESIDDEHLLIQHYCQSLNQDSPLSQPRSPAQILISLESEERGELERILADLEEENRNLQAEYDRLK
QQHEHKGLSPLPSPPEMMPTSPQSPRDAELIAEAKLLRQHKGRLEARMQILEDHNKQLESQLHRLRQLLEQPQAE
AKVNGTTVSSPSTSLQRSDSSQPMLLRVVGSQTSDSMGEEDLLSPPQDTSTGLEEVMEQLNNSFPSSRGRNTPGK
PMREDTM
Nterm-R1_R16-R17_R24 to end:
(SEQ ID NO: 19)
MLWWEEVEDCYEREDVQKKTFTKWVNAQFSKFGKQHIENLFSDLQDGRRLLDLLEGLTGQKLPKEKGSTRVHALN
NVNKALRVLQNNNVDLVNIGSTDIVDGNHKLTLGLIWNIILHWQVKNVMKNIMAGLQQTNSEKILLSWVRQSTRN
YPQVNVINFTTSWSDGLALNALIHSHRPDLFDWNSVVCQQSATQRLEHAFNIARYQLGIEKLLDPEDVDTTYPDK
KSILMYITSLFQVLPQQVSIEAIQEVEMLPRPPKVTKEEHFQLHHQMHYSQQITVSLAQGYERTSSPKPRFKSYA
YTQAAYVTTSDPTRSPFPSQHLEAPEDKSFGSSLMESEVNLDRYQTALEEVLSWLLSAEDTLQAQGEISNDVEVV
KDQFHTHEGYMMDLTAHQGRVGNILQLGSKLIGTGKLSEDEETEVQEQMNLLNSRWECLRVASMEKQSNLHRVLM
DHTVREETMMVMTEDMPLEISYVPSTYLTEITHVSQALLEVEQLLNAPDLCAKDFEDLFKQEESLKNIKDSLQQS
SGRIDIIHSKKTAALQSATPVERVKLQEALSQLDFQWEKVNKMYKDRQGRFDRSVEKWRRFHYDIKIFNQWLTEA
EQFLRKTQIPENWEHAKYKWYLKELQDGIGQRQTVVRTLNATGEEIIQQSSKTDASILQEKLGSLNLRWQEVCKQ
LSDRKKRLEEQKWQRKIDETLERLQELQEATDELDLKLRQAEVIKGSWQPVGDLLIDSLQDHLEKVKALRGEIAP
LKENVSHVNDLARQLTTLGIQLSPYNLSTLEDLNTRWKLLQVAVEDRVRQLHEAHRDFGPASQHFLSTSVQGPWE
RAISPNKVPYYINHETQTTCWDHPKMTELYQSLADLNNVRFSAYRTAMKLRRLQKALCLDLLSLSAACDALDQHN
LKQNDQPMDILQIINCLTTIYDRLEQEHNNLVNVPLCVDMCLNWLLNVYDTGRTGRIRVLSFKTGIISLCKAHLE
DKYRYLFKQVASSTGFCDQRRLGLLLHDSIQIPRQLGEVASFGGSNIEPSVRSCFQFANNKPEIEAALFLDWMRL
EPQSMVWLPVLHRVAAAETAKHQAKCNICKECPIIGFRYRSLKHFNYDICQSCFFSGRVAKGHKMHYPMVEYCTP
TTSGEDVRDFAKVLKNKFRTKRYFAKHPRMGYLPVQTVLEGDNMETPVTLINFWPVDSAPASSPQLSHDDTHSRI
EHYASRLAEMENSNGSYLNDSISPNESIDDEHLLIQHYCQSLNQDSPLSQPRSPAQILISLESEERGELERILAD
LEEENRNLQAEYDRLKQQHEHKGLSPLPSPPEMMPTSPQSPRDAELIAEAKLLRQHKGRLEARMQILEDHNKQLE
SQLHRLRQLLEQPQAEAKVNGTTVSSPSTSLQRSDSSQPMLLRVVGSQTSDSMGEEDLLSPPQDTSTGLEEVMEQ
LNNSFPSSRGRNTPGKPMREDTM
Nterm-R2_R16-R17_R24 to end:
(SEQ ID NO: 20)
MLWWEEVEDCYEREDVQKKTFTKWVNAQFSKFGKQHIENLFSDLQDGRRLLDLLEGLTGQKLPKEKGSTRVHALN
NVNKALRVLQNNNVDLVNIGSTDIVDGNHKLTLGLIWNIILHWQVKNVMKNIMAGLQQTNSEKILLSWVRQSTRN
YPQVNVINFTTSWSDGLALNALIHSHRPDLFDWNSVVCQQSATQRLEHAFNIARYQLGIEKLLDPEDVDTTYPDK
KSILMYITSLFQVLPQQVSIEAIQEVEMLPRPPKVTKEEHFQLHHQMHYSQQITVSLAQGYERTSSPKPRFKSYA
YTQAAYVTTSDPTRSPFPSQHLEAPEDKSFGSSLMESEVNLDRYQTALEEVLSWLLSAEDTLQAQGEISNDVEVV
KDQFHTHEGYMMDLTAHQGRVGNILQLGSKLIGTGKLSEDEETEVQEQMNLLNSRWECLRVASMEKQSNLHRVLM
DLQNQKLKELNDWLTKTEERTRKMEEEPLGPDLEDLKRQVQQHKVLQEDLEQEQVRVNSLTHMVVVVDESSGDHA
TAALEEQLKVLGDRWANICRWTEDRWVLLQDHTVREETMMVMTEDMPLEISYVPSTYLTEITHVSQALLEVEQLL
NAPDLCAKDFEDLFKQEESLKNIKDSLQQSSGRIDIIHSKKTAALQSATPVERVKLQEALSQLDFQWEKVNKMYK
DRQGRFDRSVEKWRRFHYDIKIFNQWLTEAEQFLRKTQIPENWEHAKYKWYLKELQDGIGQRQTVVRTLNATGEE
IIQQSSKTDASILQEKLGSLNLRWQEVCKQLSDRKKRLEEQKWQRKIDETLERLQELQEATDELDLKLRQAEVIK
GSWQPVGDLLIDSLQDHLEKVKALRGEIAPLKENVSHVNDLARQLTTLGIQLSPYNLSTLEDLNTRWKLLQVAVE
DRVRQLHEAHRDFGPASQHFLSTSVQGPWERAISPNKVPYYINHETQTTCWDHPKMTELYQSLADLNNVRFSAYR
TAMKLRRLQKALCLDLLSLSAACDALDQHNLKQNDQPMDILQIINCLTTIYDRLEQEHNNLVNVPLCVDMCLNWL
LNVYDTGRTGRIRVLSFKTGIISLCKAHLEDKYRYLFKQVASSTGFCDQRRLGLLLHDSIQIPRQLGEVASFGGS
NIEPSVRSCFQFANNKPEIEAALFLDWMRLEPQSMVWLPVLHRVAAAETAKHQAKCNICKECPIIGFRYRSLKHF
NYDICQSCFFSGRVAKGHKMHYPMVEYCTPTTSGEDVRDFAKVLKNKFRTKRYFAKHPRMGYLPVQTVLEGDNME
TPVTLINFWPVDSAPASSPQLSHDDTHSRIEHYASRLAEMENSNGSYLNDSISPNESIDDEHLLIQHYCQSLNQD
SPLSQPRSPAQILISLESEERGELERILADLEEENRNLQAEYDRLKQQHEHKGLSPLPSPPEMMPTSPQSPRDAE
LIAEAKLLRQHKGRLEARMQILEDHNKQLESQLHRLRQLLEQPQAEAKVNGTTVSSPSTSLQRSDSSQPMLLRVV
GSQTSDSMGEEDLLSPPQDTSTGLEEVMEQLNNSFPSSRGRNTPGKPMREDTM
Nterm-R2_R16-R17_R24 to end of Syntrophin region:
(SEQ ID NO: 21)
MLWWEEVEDCYEREDVQKKTFTKWVNAQFSKFGKQHIENLFSDLQDGRRLLDLLEGLTGQKLPKEKGSTRVHALN
NVNKALRVLQNNNVDLVNIGSTDIVDGNHKLTLGLIWNIILHWQVKNVMKNIMAGLQQTNSEKILLSWVRQSTRN
YPQVNVINFTTSWSDGLALNALIHSHRPDLFDWNSVVCQQSATQRLEHAFNIARYQLGIEKLLDPEDVDTTYPDK
KSILMYITSLFQVLPQQVSIEAIQEVEMLPRPPKVTKEEHFQLHHQMHYSQQITVSLAQGYERTSSPKPRFKSYA
YTQAAYVTTSDPTRSPFPSQHLEAPEDKSFGSSLMESEVNLDRYQTALEEVLSWLLSAEDTLQAQGEISNDVEVV
KDQFHTHEGYMMDLTAHQGRVGNILQLGSKLIGTGKLSEDEETEVQEQMNLLNSRWECLRVASMEKQSNLHRVLM
DLQNQKLKELNDWLTKTEERTRKMEEEPLGPDLEDLKRQVQQHKVLQEDLEQEQVRVNSLTHMVVVVDESSGDHA
TAALEEQLKVLGDRWANICRWTEDRWVLLQDHTVREETMMVMTEDMPLEISYVPSTYLTEITHVSQALLEVEQLL
NAPDLCAKDFEDLFKQEESLKNIKDSLQQSSGRIDIIHSKKTAALQSATPVERVKLQEALSQLDFQWEKVNKMYK
DRQGRFDRSVEKWRRFHYDIKIFNQWLTEAEQFLRKTQIPENWEHAKYKWYLKELQDGIGQRQTVVRTLNATGEE
IIQQSSKTDASILQEKLGSLNLRWQEVCKQLSDRKKRLEEQKWQRKIDETLERLQELQEATDELDLKLRQAEVIK
GSWQPVGDLLIDSLQDHLEKVKALRGEIAPLKENVSHVNDLARQLTTLGIQLSPYNLSTLEDLNTRWKLLQVAVE
DRVRQLHEAHRDFGPASQHFLSTSVQGPWERAISPNKVPYYINHETQTTCWDHPKMTELYQSLADLNNVRFSAYR
TAMKLRRLQKALCLDLLSLSAACDALDQHNLKQNDQPMDILQIINCLTTIYDRLEQEHNNLVNVPLCVDMCLNWL
LNVYDTGRTGRIRVLSFKTGIISLCKAHLEDKYRYLFKQVASSTGFCDQRRLGLLLHDSIQIPRQLGEVASFGGS
NIEPSVRSCFQFANNKPEIEAALFLDWMRLEPQSMVWLPVLHRVAAAETAKHQAKCNICKECPIIGFRYRSLKHF
NYDICQSCFFSGRVAKGHKMHYPMVEYCTPTTSGEDVRDFAKVLKNKFRTKRYFAKHPRMGYLPVQTVLEGDNME
TPVTLINFWPVDSAPASSPQLSHDDTHSRIEHYASRLAEMENSNGSYLNDSISPNESIDDEHLLIQHYCQSLNQD
SPLSQPRS

[0106] A micro-dystrophin protein optimized for skeletal muscle is further understood to include proteins that are variants of any one of SEQ ID Nos. 13-21, 93-101, 132, and 149-155. Variant polypeptides include polypeptides that differ by one or more (e.g., 1, 2, 3, 4, 5, 6, 7, 8, 9, 10, 11, 12, 13, 14, 15, 16, 17, 18, 19, 20, or more) amino acid substitutions, additions, or deletions, and will, therefore, include amino acid sequences that differ from the amino acid sequences designated in any one of SEQ ID Nos. 13-21, 93-101, 132, and 149-155.

[0107] In some embodiments, a micro-dystrophin protein optimized for skeletal muscle comprises an amino acid sequence that is at least 65%, at least 68%, at least 70%, at least 75%, at least 80%, at least 85%, at least 90%, at least 91%, at least 92%, at least 93%, at least 94%, at least 95%, at least 96%, at least 97%, at least 98%, at least 99%, or 100% identical to the amino acid sequence of any one of SEQ ID Nos. 13-21, 93-101, 132, and 149-155. In some embodiments, a micro-dystrophin protein optimized for skeletal muscle consists essentially of an amino acid sequence that is at least 65%, at least 68%, at least 70%, at least 75%, at least 80%, at least 85%, at least 90%, at least 91%, at least 92%, at least 93%, at least 94%, at least 95%, at least 96%, at least 97%, at least 98%, at least 99%, or 100% identical to the amino acid sequence of any one of SEQ ID Nos. 13-21, 93-101, 132, and 149-155.

[0108] In some embodiments, a micro-dystrophin protein optimized for skeletal muscle consists of an amino acid sequence that is at least 65%, at least 68%, at least 70%, at least 75%, at least 80%, at least 85%, at least 90%, at least 91%, at least 92%, at least 93%, at least 94%, at least 95%, at least 96%, at least 97%, at least 98%, at least 99%, or 100% identical to the amino acid sequence of any one of SEQ ID Nos. 13-21, 93-101, 132, and 149-155.

[0109] In some embodiments, functional variants or modified forms of micro-dystrophin proteins optimized for skeletal muscle include fusion proteins having at least a portion of the micro-dystrophin protein and one or more fusion domains. Well-known examples of such fusion domains include, but are not limited to, polyhistidine, Glu-Glu, glutathione S transferase (GST), thioredoxin, protein A, protein G, an immunoglobulin heavy chain constant region (Fc), maltose binding protein (MBP), or human serum albumin. A fusion domain may be selected so as to confer a desired property. For example, some fusion domains are particularly useful for isolation of the fusion proteins by affinity chromatography. Other fusion domains are particularly useful for increasing protein stability.

[0110] The disclosure also provides nucleic acids encoding any of the micro-dystrophins optimized for skeletal muscle described herein. Such nucleic acids may be DNA or RNA molecules. These nucleic acids may be used, for example, in methods for making micro-dystrophins or as direct therapeutic agents in a gene therapy approach.

[0111] In some embodiments, a micro-dystrophin protein as described herein further comprises one or more utrophin protein domains.

[0112] Non-limiting examples of nucleotide sequences encoding human micro-dystrophin proteins optimized for skeletal muscle are described below.

Nterm-R2_R16-R17_R24 + H4 + trCterm:
(SEQ ID NO: 22)
ATGCTTTGGTGGGAAGAAGTAGAGGACTGTTATGAAAGAGAAGATGTTCAAAAGAAAACATTCACAAAATGGGTA
AATGCACAATTTTCTAAGTTTGGGAAGCAGCATATTGAGAACCTCTTCAGTGACCTACAGGATGGGAGGCGCCTC
CTAGACCTCCTCGAAGGCCTGACAGGGCAAAAACTGCCAAAAGAAAAAGGATCCACAAGAGTTCATGCCCTGAAC
AATGTCAACAAGGCACTGCGGGTTTTGCAGAACAATAATGTTGATTTAGTGAATATTGGAAGTACTGACATCGTA
GATGGAAATCATAAACTGACTCTTGGTTTGATTTGGAATATAATCCTCCACTGGCAGGTCAAAAATGTAATGAAA
AATATCATGGCTGGATTGCAACAAACCAACAGTGAAAAGATTCTCCTGAGCTGGGTCCGACAATCAACTCGTAAT
TATCCACAGGTTAATGTAATCAACTTCACCACCAGCTGGTCTGATGGCCTGGCTTTGAATGCTCTCATCCATAGT
CATAGGCCAGACCTATTTGACTGGAATAGTGTGGTTTGCCAGCAGTCAGCCACACAACGACTGGAACATGCATTC
AACATCGCCAGATATCAATTAGGCATAGAGAAACTACTCGATCCTGAAGATGTTGATACCACCTATCCAGATAAG
AAGTCCATCTTAATGTACATCACATCACTCTTCCAAGTTTTGCCTCAACAAGTGAGCATTGAAGCCATCCAGGAA
GTGGAAATGTTGCCAAGGCCACCTAAAGTGACTAAAGAAGAACATTTTCAGTTACATCATCAAATGCACTATTCT
CAACAGATCACGGTCAGTCTAGCACAGGGATATGAGAGAACTTCTTCCCCTAAGCCTCGATTCAAGAGCTATGCC
TACACACAGGCTGCTTATGTCACCACCTCTGACCCTACACGGAGCCCATTTCCTTCACAGCATTTGGAAGCTCCT
GAAGACAAGTCATTTGGCAGTTCATTGATGGAGAGTGAAGTAAACCTGGACCGTTATCAAACAGCTTTAGAAGAA
GTATTATCGTGGCTTCTTTCTGCTGAGGACACATTGCAAGCACAAGGAGAGATTTCTAATGATGTGGAAGTGGTG
AAAGACCAGTTTCATACTCATGAGGGGTACATGATGGATTTGACAGCCCATCAGGGCCGGGTTGGTAATATTCTA
CAATTGGGAAGTAAGCTGATTGGAACAGGAAAATTATCAGAAGATGAAGAAACTGAAGTACAAGAGCAGATGAAT
CTCCTAAATTCAAGATGGGAATGCCTCAGGGTAGCTAGCATGGAAAAACAAAGCAATTTACATAGAGTTTTAATG
GATCTCCAGAATCAGAAACTGAAAGAGTTGAATGACTGGCTAACAAAAACAGAAGAAAGAACAAGGAAAATGGAG
GAAGAGCCTCTTGGACCTGATCTTGAAGACCTAAAACGCCAAGTACAACAACATAAGGTGCTTCAAGAAGATCTA
GAACAAGAACAAGTCAGGGTCAATTCTCTCACTCACATGGTGGTGGTAGTTGATGAATCTAGTGGAGATCACGCA
ACTGCTGCTTTGGAAGAACAACTTAAGGTATTGGGAGATCGATGGGCAAACATCTGTAGATGGACAGAAGACCGC
TGGGTTCTTTTACAAGACCACACTGTCCGTGAAGAAACGATGATGGTGATGACTGAAGACATGCCTTTGGAAATT
TCTTATGTGCCTTCTACTTATTTGACTGAAATCACTCATGTCTCACAAGCCCTATTAGAAGTGGAACAACTTCTC
AATGCTCCTGACCTCTGTGCTAAGGACTTTGAAGATCTCTTTAAGCAAGAGGAGTCTCTGAAGAATATAAAAGAT
AGTCTACAACAAAGCTCAGGTCGGATTGACATTATTCATAGCAAGAAGACAGCAGCATTGCAAAGTGCAACGCCT
GTGGAAAGGGTGAAGCTACAGGAAGCTCTCTCCCAGCTTGATTTCCAATGGGAAAAAGTTAACAAAATGTACAAG
GACCGACAAGGGCGATTTGACAGATCTGTTGAGAAATGGCGGCGTTTTCATTATGATATAAAGATATTTAATCAG
TGGCTAACAGAAGCTGAACAGTTTCTCAGAAAGACACAAATTCCTGAGAATTGGGAACATGCTAAATACAAATGG
TATCTTAAGGAACTCCAGGATGGCATTGGGCAGCGGCAAACTGTTGTCAGAACATTGAATGCAACTGGGGAAGAA
ATAATTCAGCAATCCTCAAAAACAGATGCCAGTATTCTACAGGAAAAATTGGGAAGCCTGAATCTGCGGTGGCAG
GAGGTCTGCAAACAGCTGTCAGACAGAAAAAAGAGGCTAGAAGAACAAAAGTGGCAGAGAAAAATAGATGAGACC
CTTGAAAGACTCCGGGAACTTCAAGAGGCCACGGATGAGCTGGACCTCAAGCTGCGCCAAGCTGAGGTGATCAAG
GGATCCTGGCAGCCCGTGGGCGATCTCCTCATTGACTCTCTCCAAGATCACCTCGAGAAAGTCAAGGCACTTCGA
GGAGAAATTGCGCCTCTGAAAGAGAACGTGAGCCACGTCAATGACCTTGCTCGCCAGCTTACCACTTTGGGCATT
CAGCTCTCACCGTATAACCTCAGCACTCTGGAAGACCTGAACACCAGATGGAAGCTTCTGCAGGTGGCCGTCGAG
GACCGAGTCAGGCAGCTGCATGAAGCCCACAGGGACTTTGGTCCAGCATCTCAGCACTTTCTTTCCACGTCTGTC
CAGGGTCCCTGGGAGAGAGCCATCTCGCCAAACAAAGTGCCCTACTATATCAACCACGAGACTCAAACAACTTGC
TGGGACCATCCCAAAATGACAGAGCTCTACCAGTCTTTAGCTGACCTGAATAATGTCAGATTCTCAGCTTATAGG
ACTGCCATGAAACTCCGAAGACTGCAGAAGGCCCTTTGCTTGGATCTCTTGAGCCTGTCAGCTGCATGTGATGCC
TTGGACCAGCACAACCTCAAGCAAAATGACCAGCCCATGGATATCCTGCAGATTATTAATTGTTTGACCACTATT
TATGACCGCCTGGAGCAAGAGCACAACAATTTGGTCAACGTCCCTCTCTGCGTGGATATGTGTCTGAACTGGCTG
CTGAATGTTTATGATACGGGACGAACAGGGAGGATCCGTGTCCTGTCTTTTAAAACTGGCATCATTTCCCTGTGT
AAAGCACATTTGGAAGACAAGTACAGATACCTTTTCAAGCAAGTGGCAAGTTCAACAGGATTTTGTGACCAGCGC
AGGCTGGGCCTCCTTCTGCATGATTCTATCCAAATTCCAAGACAGTTGGGTGAAGTTGCATCCTTTGGGGGCAGT
AACATTGAGCCAAGTGTCCGGAGCTGCTTCCAATTTGCTAATAATAAGCCAGAGATCGAAGCGGCCCTCTTCCTA
GACTGGATGAGACTGGAACCCCAGTCCATGGTGTGGCTGCCCGTCCTGCACAGAGTGGCTGCTGCAGAAACTGCC
AAGCATCAGGCCAAATGTAACATCTGCAAAGAGTGTCCAATCATTGGATTCAGGTACAGGAGTCTAAAGCACTTT
AATTATGACATCTGCCAAAGCTGCTTTTTTTCTGGTCGAGTTGCAAAAGGCCATAAAATGCACTATCCCATGGTG
GAATATTGCACTCCGACTACATCAGGAGAAGATGTTCGAGACTTTGCCAAGGTACTAAAAAACAAATTTCGAACC
AAAAGGTATTTTGCGAAGCATCCCCGAATGGGCTACCTGCCAGTGCAGACTGTCTTAGAGGGGGACAACATGGAA
ACTCCC
Nterm-R2_R16-R17_H4 to end of syntrophin region:
(SEQ ID NO: 23)
ATGCTTTGGTGGGAAGAAGTAGAGGACTGTTATGAAAGAGAAGATGTTCAAAAGAAAACATTCACAAAATGGGTA
AATGCACAATTTTCTAAGTTTGGGAAGCAGCATATTGAGAACCTCTTCAGTGACCTACAGGATGGGAGGCGCCTC
CTAGACCTCCTCGAAGGCCTGACAGGGCAAAAACTGCCAAAAGAAAAAGGATCCACAAGAGTTCATGCCCTGAAC
AATGTCAACAAGGCACTGCGGGTTTTGCAGAACAATAATGTTGATTTAGTGAATATTGGAAGTACTGACATCGTA
GATGGAAATCATAAACTGACTCTTGGTTTGATTTGGAATATAATCCTCCACTGGCAGGTCAAAAATGTAATGAAA
AATATCATGGCTGGATTGCAACAAACCAACAGTGAAAAGATTCTCCTGAGCTGGGTCCGACAATCAACTCGTAAT
TATCCACAGGTTAATGTAATCAACTTCACCACCAGCTGGTCTGATGGCCTGGCTTTGAATGCTCTCATCCATAGT
CATAGGCCAGACCTATTTGACTGGAATAGTGTGGTTTGCCAGCAGTCAGCCACACAACGACTGGAACATGCATTC
AACATCGCCAGATATCAATTAGGCATAGAGAAACTACTCGATCCTGAAGATGTTGATACCACCTATCCAGATAAG
AAGTCCATCTTAATGTACATCACATCACTCTTCCAAGTTTTGCCTCAACAAGTGAGCATTGAAGCCATCCAGGAA
GTGGAAATGTTGCCAAGGCCACCTAAAGTGACTAAAGAAGAACATTTTCAGTTACATCATCAAATGCACTATTCT
CAACAGATCACGGTCAGTCTAGCACAGGGATATGAGAGAACTTCTTCCCCTAAGCCTCGATTCAAGAGCTATGCC
TACACACAGGCTGCTTATGTCACCACCTCTGACCCTACACGGAGCCCATTTCCTTCACAGCATTTGGAAGCTCCT
GAAGACAAGTCATTTGGCAGTTCATTGATGGAGAGTGAAGTAAACCTGGACCGTTATCAAACAGCTTTAGAAGAA
GTATTATCGTGGCTTCTTTCTGCTGAGGACACATTGCAAGCACAAGGAGAGATTTCTAATGATGTGGAAGTGGTG
AAAGACCAGTTTCATACTCATGAGGGGTACATGATGGATTTGACAGCCCATCAGGGCCGGGTTGGTAATATTCTA
CAATTGGGAAGTAAGCTGATTGGAACAGGAAAATTATCAGAAGATGAAGAAACTGAAGTACAAGAGCAGATGAAT
CTCCTAAATTCAAGATGGGAATGCCTCAGGGTAGCTAGCATGGAAAAACAAAGCAATTTACATAGAGTTTTAATG
GATCTCCAGAATCAGAAACTGAAAGAGTTGAATGACTGGCTAACAAAAACAGAAGAAAGAACAAGGAAAATGGAG
GAAGAGCCTCTTGGACCTGATCTTGAAGACCTAAAACGCCAAGTACAACAACATAAGGTGCTTCAAGAAGATCTA
GAACAAGAACAAGTCAGGGTCAATTCTCTCACTCACATGGTGGTGGTAGTTGATGAATCTAGTGGAGATCACGCA
ACTGCTGCTTTGGAAGAACAACTTAAGGTATTGGGAGATCGATGGGCAAACATCTGTAGATGGACAGAAGACCGC
TGGGTTCTTTTACAAGACCACACTGTCCGTGAAGAAACGATGATGGTGATGACTGAAGACATGCCTTTGGAAATT
TCTTATGTGCCTTCTACTTATTTGACTGAAATCACTCATGTCTCACAAGCCCTATTAGAAGTGGAACAACTTCTC
AATGCTCCTGACCTCTGTGCTAAGGACTTTGAAGATCTCTTTAAGCAAGAGGAGTCTCTGAAGAATATAAAAGAT
AGTCTACAACAAAGCTCAGGTCGGATTGACATTATTCATAGCAAGAAGACAGCAGCATTGCAAAGTGCAACGCCT
GTGGAAAGGGTGAAGCTACAGGAAGCTCTCTCCCAGCTTGATTTCCAATGGGAAAAAGTTAACAAAATGTACAAG
GACCGACAAGGGCGATTTGACAGATCTGTTGAGAAATGGCGGCGTTTTCATTATGATATAAAGATATTTAATCAG
TGGCTAACAGAAGCTGAACAGTTTCTCAGAAAGACACAAATTCCTGAGAATTGGGAACATGCTAAATACAAATGG
TATCTTAAGGAACTCCAGGATGGCATTGGGCAGCGGCAAACTGTTGTCAGAACATTGAATGCAACTGGGGAAGAA
ATAATTCAGCAATCCTCAAAAACAGATGCCAGTATTCTACAGGAAAAATTGGGAAGCCTGAATCTGCGGTGGCAG
GAGGTCTGCAAACAGCTGTCAGACAGAAAAAAGAGGCTAGAAGAACAAAAGGGTCCAGCATCTCAGCACTTTCTT
TCCACGTCTGTCCAGGGTCCCTGGGAGAGAGCCATCTCGCCAAACAAAGTGCCCTACTATATCAACCACGAGACT
CAAACAACTTGCTGGGACCATCCCAAAATGACAGAGCTCTACCAGTCTTTAGCTGACCTGAATAATGTCAGATTC
TCAGCTTATAGGACTGCCATGAAACTCCGAAGACTGCAGAAGGCCCTTTGCTTGGATCTCTTGAGCCTGTCAGCT
GCATGTGATGCCTTGGACCAGCACAACCTCAAGCAAAATGACCAGCCCATGGATATCCTGCAGATTATTAATTGT
TTGACCACTATTTATGACCGCCTGGAGCAAGAGCACAACAATTTGGTCAACGTCCCTCTCTGCGTGGATATGTGT
CTGAACTGGCTGCTGAATGTTTATGATACGGGACGAACAGGGAGGATCCGTGTCCTGTCTTTTAAAACTGGCATC
ATTTCCCTGTGTAAAGCACATTTGGAAGACAAGTACAGATACCTTTTCAAGCAAGTGGCAAGTTCAACAGGATTT
TGTGACCAGCGCAGGCTGGGCCTCCTTCTGCATGATTCTATCCAAATTCCAAGACAGTTGGGTGAAGTTGCATCC
TTTGGGGGCAGTAACATTGAGCCAAGTGTCCGGAGCTGCTTCCAATTTGCTAATAATAAGCCAGAGATCGAAGCG
GCCCTCTTCCTAGACTGGATGAGACTGGAACCCCAGTCCATGGTGTGGCTGCCCGTCCTGCACAGAGTGGCTGCT
GCAGAAACTGCCAAGCATCAGGCCAAATGTAACATCTGCAAAGAGTGTCCAATCATTGGATTCAGGTACAGGAGT
CTAAAGCACTTTAATTATGACATCTGCCAAAGCTGCTTTTTTTCTGGTCGAGTTGCAAAAGGCCATAAAATGCAC
TATCCCATGGTGGAATATTGCACTCCGACTACATCAGGAGAAGATGTTCGAGACTTTGCCAAGGTACTAAAAAAC
AAATTTCGAACCAAAAGGTATTTTGCGAAGCATCCCCGAATGGGCTACCTGCCAGTGCAGACTGTCTTAGAGGGG
GACAACATGGAAACTCCCGTTACTCTGATCAACTTCTGGCCAGTAGATTCTGCGCCTGCCTCGTCCCCTCAGCTT
TCACACGATGATACTCATTCACGCATTGAACATTATGCTAGCAGGCTAGCAGAAATGGAAAACAGCAATGGATCT
TATCTAAATGATAGCATCTCTCCTAATGAGAGCATAGATGATGAACATTTGTTAATCCAGCATTACTGCCAAAGT
TTGAACCAGGACTCCCCCCTGAGCCAGCCTCGTAGT
Nterm-R2_R16-R17_H4 to 1st coiled coil and proline rich region that follows:
(SEQ ID NO: 24)
ATGCTTTGGTGGGAAGAAGTAGAGGACTGTTATGAAAGAGAAGATGTTCAAAAGAAAACATTCACAAAATGGGTA
AATGCACAATTTTCTAAGTTTGGGAAGCAGCATATTGAGAACCTCTTCAGTGACCTACAGGATGGGAGGCGCCTC
CTAGACCTCCTCGAAGGCCTGACAGGGCAAAAACTGCCAAAAGAAAAAGGATCCACAAGAGTTCATGCCCTGAAC
AATGTCAACAAGGCACTGCGGGTTTTGCAGAACAATAATGTTGATTTAGTGAATATTGGAAGTACTGACATCGTA
GATGGAAATCATAAACTGACTCTTGGTTTGATTTGGAATATAATCCTCCACTGGCAGGTCAAAAATGTAATGAAA
AATATCATGGCTGGATTGCAACAAACCAACAGTGAAAAGATTCTCCTGAGCTGGGTCCGACAATCAACTCGTAAT
TATCCACAGGTTAATGTAATCAACTTCACCACCAGCTGGTCTGATGGCCTGGCTTTGAATGCTCTCATCCATAGT
CATAGGCCAGACCTATTTGACTGGAATAGTGTGGTTTGCCAGCAGTCAGCCACACAACGACTGGAACATGCATTC
AACATCGCCAGATATCAATTAGGCATAGAGAAACTACTCGATCCTGAAGATGTTGATACCACCTATCCAGATAAG
AAGTCCATCTTAATGTACATCACATCACTCTTCCAAGTTTTGCCTCAACAAGTGAGCATTGAAGCCATCCAGGAA
GTGGAAATGTTGCCAAGGCCACCTAAAGTGACTAAAGAAGAACATTTTCAGTTACATCATCAAATGCACTATTCT
CAACAGATCACGGTCAGTCTAGCACAGGGATATGAGAGAACTTCTTCCCCTAAGCCTCGATTCAAGAGCTATGCC
TACACACAGGCTGCTTATGTCACCACCTCTGACCCTACACGGAGCCCATTTCCTTCACAGCATTTGGAAGCTCCT
GAAGACAAGTCATTTGGCAGTTCATTGATGGAGAGTGAAGTAAACCTGGACCGTTATCAAACAGCTTTAGAAGAA
GTATTATCGTGGCTTCTTTCTGCTGAGGACACATTGCAAGCACAAGGAGAGATTTCTAATGATGTGGAAGTGGTG
AAAGACCAGTTTCATACTCATGAGGGGTACATGATGGATTTGACAGCCCATCAGGGCCGGGTTGGTAATATTCTA
CAATTGGGAAGTAAGCTGATTGGAACAGGAAAATTATCAGAAGATGAAGAAACTGAAGTACAAGAGCAGATGAAT
CTCCTAAATTCAAGATGGGAATGCCTCAGGGTAGCTAGCATGGAAAAACAAAGCAATTTACATAGAGTTTTAATG
GATCTCCAGAATCAGAAACTGAAAGAGTTGAATGACTGGCTAACAAAAACAGAAGAAAGAACAAGGAAAATGGAG
GAAGAGCCTCTTGGACCTGATCTTGAAGACCTAAAACGCCAAGTACAACAACATAAGGTGCTTCAAGAAGATCTA
GAACAAGAACAAGTCAGGGTCAATTCTCTCACTCACATGGTGGTGGTAGTTGATGAATCTAGTGGAGATCACGCA
ACTGCTGCTTTGGAAGAACAACTTAAGGTATTGGGAGATCGATGGGCAAACATCTGTAGATGGACAGAAGACCGC
TGGGTTCTTTTACAAGACCACACTGTCCGTGAAGAAACGATGATGGTGATGACTGAAGACATGCCTTTGGAAATT
TCTTATGTGCCTTCTACTTATTTGACTGAAATCACTCATGTCTCACAAGCCCTATTAGAAGTGGAACAACTTCTC
AATGCTCCTGACCTCTGTGCTAAGGACTTTGAAGATCTCTTTAAGCAAGAGGAGTCTCTGAAGAATATAAAAGAT
AGTCTACAACAAAGCTCAGGTCGGATTGACATTATTCATAGCAAGAAGACAGCAGCATTGCAAAGTGCAACGCCT
GTGGAAAGGGTGAAGCTACAGGAAGCTCTCTCCCAGCTTGATTTCCAATGGGAAAAAGTTAACAAAATGTACAAG
GACCGACAAGGGCGATTTGACAGATCTGTTGAGAAATGGCGGCGTTTTCATTATGATATAAAGATATTTAATCAG
TGGCTAACAGAAGCTGAACAGTTTCTCAGAAAGACACAAATTCCTGAGAATTGGGAACATGCTAAATACAAATGG
TATCTTAAGGAACTCCAGGATGGCATTGGGCAGCGGCAAACTGTTGTCAGAACATTGAATGCAACTGGGGAAGAA
ATAATTCAGCAATCCTCAAAAACAGATGCCAGTATTCTACAGGAAAAATTGGGAAGCCTGAATCTGCGGTGGCAG
GAGGTCTGCAAACAGCTGTCAGACAGAAAAAAGAGGCTAGAAGAACAAAAGGGTCCAGCATCTCAGCACTTTCTT
TCCACGTCTGTCCAGGGTCCCTGGGAGAGAGCCATCTCGCCAAACAAAGTGCCCTACTATATCAACCACGAGACT
CAAACAACTTGCTGGGACCATCCCAAAATGACAGAGCTCTACCAGTCTTTAGCTGACCTGAATAATGTCAGATTC
TCAGCTTATAGGACTGCCATGAAACTCCGAAGACTGCAGAAGGCCCTTTGCTTGGATCTCTTGAGCCTGTCAGCT
GCATGTGATGCCTTGGACCAGCACAACCTCAAGCAAAATGACCAGCCCATGGATATCCTGCAGATTATTAATTGT
TTGACCACTATTTATGACCGCCTGGAGCAAGAGCACAACAATTTGGTCAACGTCCCTCTCTGCGTGGATATGTGT
CTGAACTGGCTGCTGAATGTTTATGATACGGGACGAACAGGGAGGATCCGTGTCCTGTCTTTTAAAACTGGCATC
ATTTCCCTGTGTAAAGCACATTTGGAAGACAAGTACAGATACCTTTTCAAGCAAGTGGCAAGTTCAACAGGATTT
TGTGACCAGCGCAGGCTGGGCCTCCTTCTGCATGATTCTATCCAAATTCCAAGACAGTTGGGTGAAGTTGCATCC
TTTGGGGGCAGTAACATTGAGCCAAGTGTCCGGAGCTGCTTCCAATTTGCTAATAATAAGCCAGAGATCGAAGCG
GCCCTCTTCCTAGACTGGATGAGACTGGAACCCCAGTCCATGGTGTGGCTGCCCGTCCTGCACAGAGTGGCTGCT
GCAGAAACTGCCAAGCATCAGGCCAAATGTAACATCTGCAAAGAGTGTCCAATCATTGGATTCAGGTACAGGAGT
CTAAAGCACTTTAATTATGACATCTGCCAAAGCTGCTTTTTTTCTGGTCGAGTTGCAAAAGGCCATAAAATGCAC
TATCCCATGGTGGAATATTGCACTCCGACTACATCAGGAGAAGATGTTCGAGACTTTGCCAAGGTACTAAAAAAC
AAATTTCGAACCAAAAGGTATTTTGCGAAGCATCCCCGAATGGGCTACCTGCCAGTGCAGACTGTCTTAGAGGGG
GACAACATGGAAACTCCCGTTACTCTGATCAACTTCTGGCCAGTAGATTCTGCGCCTGCCTCGTCCCCTCAGCTT
TCACACGATGATACTCATTCACGCATTGAACATTATGCTAGCAGGCTAGCAGAAATGGAAAACAGCAATGGATCT
TATCTAAATGATAGCATCTCTCCTAATGAGAGCATAGATGATGAACATTTGTTAATCCAGCATTACTGCCAAAGT
TTGAACCAGGACTCCCCCCTGAGCCAGCCTCGTAGTCCTGCCCAGATCTTGATTTCCTTAGAGAGTGAGGAAAGA
GGGGAGCTAGAGAGAATCCTAGCAGATCTTGAGGAAGAAAACAGGAATCTGCAAGCAGAATATGACCGTCTAAAG
CAGCAGCACGAACATAAAGGCCTGTCCCCACTGCCGTCCCCTCCTGAAATGATGCCCACCTCTCCCCAGAGTCCC
Nterm-R2_R16-R17_R24 to 1st coiled coil and proline rich region that follows:
(SEQ ID NO: 25)
ATGCTTTGGTGGGAAGAAGTAGAGGACTGTTATGAAAGAGAAGATGTTCAAAAGAAAACATTCACAAAATGGGTA
AATGCACAATTTTCTAAGTTTGGGAAGCAGCATATTGAGAACCTCTTCAGTGACCTACAGGATGGGAGGCGCCTC
CTAGACCTCCTCGAAGGCCTGACAGGGCAAAAACTGCCAAAAGAAAAAGGATCCACAAGAGTTCATGCCCTGAAC
AATGTCAACAAGGCACTGCGGGTTTTGCAGAACAATAATGTTGATTTAGTGAATATTGGAAGTACTGACATCGTA
GATGGAAATCATAAACTGACTCTTGGTTTGATTTGGAATATAATCCTCCACTGGCAGGTCAAAAATGTAATGAAA
AATATCATGGCTGGATTGCAACAAACCAACAGTGAAAAGATTCTCCTGAGCTGGGTCCGACAATCAACTCGTAAT
TATCCACAGGTTAATGTAATCAACTTCACCACCAGCTGGTCTGATGGCCTGGCTTTGAATGCTCTCATCCATAGT
CATAGGCCAGACCTATTTGACTGGAATAGTGTGGTTTGCCAGCAGTCAGCCACACAACGACTGGAACATGCATTC
AACATCGCCAGATATCAATTAGGCATAGAGAAACTACTCGATCCTGAAGATGTTGATACCACCTATCCAGATAAG
AAGTCCATCTTAATGTACATCACATCACTCTTCCAAGTTTTGCCTCAACAAGTGAGCATTGAAGCCATCCAGGAA
GTGGAAATGTTGCCAAGGCCACCTAAAGTGACTAAAGAAGAACATTTTCAGTTACATCATCAAATGCACTATTCT
CAACAGATCACGGTCAGTCTAGCACAGGGATATGAGAGAACTTCTTCCCCTAAGCCTCGATTCAAGAGCTATGCC
TACACACAGGCTGCTTATGTCACCACCTCTGACCCTACACGGAGCCCATTTCCTTCACAGCATTTGGAAGCTCCT
GAAGACAAGTCATTTGGCAGTTCATTGATGGAGAGTGAAGTAAACCTGGACCGTTATCAAACAGCTTTAGAAGAA
GTATTATCGTGGCTTCTTTCTGCTGAGGACACATTGCAAGCACAAGGAGAGATTTCTAATGATGTGGAAGTGGTG
AAAGACCAGTTTCATACTCATGAGGGGTACATGATGGATTTGACAGCCCATCAGGGCCGGGTTGGTAATATTCTA
CAATTGGGAAGTAAGCTGATTGGAACAGGAAAATTATCAGAAGATGAAGAAACTGAAGTACAAGAGCAGATGAAT
CTCCTAAATTCAAGATGGGAATGCCTCAGGGTAGCTAGCATGGAAAAACAAAGCAATTTACATAGAGTTTTAATG
GATCTCCAGAATCAGAAACTGAAAGAGTTGAATGACTGGCTAACAAAAACAGAAGAAAGAACAAGGAAAATGGAG
GAAGAGCCTCTTGGACCTGATCTTGAAGACCTAAAACGCCAAGTACAACAACATAAGGTGCTTCAAGAAGATCTA
GAACAAGAACAAGTCAGGGTCAATTCTCTCACTCACATGGTGGTGGTAGTTGATGAATCTAGTGGAGATCACGCA
ACTGCTGCTTTGGAAGAACAACTTAAGGTATTGGGAGATCGATGGGCAAACATCTGTAGATGGACAGAAGACCGC
TGGGTTCTTTTACAAGACCACACTGTCCGTGAAGAAACGATGATGGTGATGACTGAAGACATGCCTTTGGAAATT
TCTTATGTGCCTTCTACTTATTTGACTGAAATCACTCATGTCTCACAAGCCCTATTAGAAGTGGAACAACTTCTC
AATGCTCCTGACCTCTGTGCTAAGGACTTTGAAGATCTCTTTAAGCAAGAGGAGTCTCTGAAGAATATAAAAGAT
AGTCTACAACAAAGCTCAGGTCGGATTGACATTATTCATAGCAAGAAGACAGCAGCATTGCAAAGTGCAACGCCT
GTGGAAAGGGTGAAGCTACAGGAAGCTCTCTCCCAGCTTGATTTCCAATGGGAAAAAGTTAACAAAATGTACAAG
GACCGACAAGGGCGATTTGACAGATCTGTTGAGAAATGGCGGCGTTTTCATTATGATATAAAGATATTTAATCAG
TGGCTAACAGAAGCTGAACAGTTTCTCAGAAAGACACAAATTCCTGAGAATTGGGAACATGCTAAATACAAATGG
TATCTTAAGGAACTCCAGGATGGCATTGGGCAGCGGCAAACTGTTGTCAGAACATTGAATGCAACTGGGGAAGAA
ATAATTCAGCAATCCTCAAAAACAGATGCCAGTATTCTACAGGAAAAATTGGGAAGCCTGAATCTGCGGTGGCAG
GAGGTCTGCAAACAGCTGTCAGACAGAAAAAAGAGGCTAGAAGAACAAAAGTGGCAGAGAAAAATAGATGAGACC
CTTGAAAGACTCCGGGAACTTCAAGAGGCCACGGATGAGCTGGACCTCAAGCTGCGCCAAGCTGAGGTGATCAAG
GGATCCTGGCAGCCCGTGGGCGATCTCCTCATTGACTCTCTCCAAGATCACCTCGAGAAAGTCAAGGCACTTCGA
GGAGAAATTGCGCCTCTGAAAGAGAACGTGAGCCACGTCAATGACCTTGCTCGCCAGCTTACCACTTTGGGCATT
CAGCTCTCACCGTATAACCTCAGCACTCTGGAAGACCTGAACACCAGATGGAAGCTTCTGCAGGTGGCCGTCGAG
GACCGAGTCAGGCAGCTGCATGAAGCCCACAGGGACTTTGGTCCAGCATCTCAGCACTTTCTTTCCACGTCTGTC
CAGGGTCCCTGGGAGAGAGCCATCTCGCCAAACAAAGTGCCCTACTATATCAACCACGAGACTCAAACAACTTGC
TGGGACCATCCCAAAATGACAGAGCTCTACCAGTCTTTAGCTGACCTGAATAATGTCAGATTCTCAGCTTATAGG
ACTGCCATGAAACTCCGAAGACTGCAGAAGGCCCTTTGCTTGGATCTCTTGAGCCTGTCAGCTGCATGTGATGCC
TTGGACCAGCACAACCTCAAGCAAAATGACCAGCCCATGGATATCCTGCAGATTATTAATTGTTTGACCACTATT
TATGACCGCCTGGAGCAAGAGCACAACAATTTGGTCAACGTCCCTCTCTGCGTGGATATGTGTCTGAACTGGCTG
CTGAATGTTTATGATACGGGACGAACAGGGAGGATCCGTGTCCTGTCTTTTAAAACTGGCATCATTTCCCTGTGT
AAAGCACATTTGGAAGACAAGTACAGATACCTTTTCAAGCAAGTGGCAAGTTCAACAGGATTTTGTGACCAGCGC
AGGCTGGGCCTCCTTCTGCATGATTCTATCCAAATTCCAAGACAGTTGGGTGAAGTTGCATCCTTTGGGGGCAGT
AACATTGAGCCAAGTGTCCGGAGCTGCTTCCAATTTGCTAATAATAAGCCAGAGATCGAAGCGGCCCTCTTCCTA
GACTGGATGAGACTGGAACCCCAGTCCATGGTGTGGCTGCCCGTCCTGCACAGAGTGGCTGCTGCAGAAACTGCC
AAGCATCAGGCCAAATGTAACATCTGCAAAGAGTGTCCAATCATTGGATTCAGGTACAGGAGTCTAAAGCACTTT
AATTATGACATCTGCCAAAGCTGCTTTTTTTCTGGTCGAGTTGCAAAAGGCCATAAAATGCACTATCCCATGGTG
GAATATTGCACTCCGACTACATCAGGAGAAGATGTTCGAGACTTTGCCAAGGTACTAAAAAACAAATTTCGAACC
AAAAGGTATTTTGCGAAGCATCCCCGAATGGGCTACCTGCCAGTGCAGACTGTCTTAGAGGGGGACAACATGGAA
ACTCCCGTTACTCTGATCAACTTCTGGCCAGTAGATTCTGCGCCTGCCTCGTCCCCTCAGCTTTCACACGATGAT
ACTCATTCACGCATTGAACATTATGCTAGCAGGCTAGCAGAAATGGAAAACAGCAATGGATCTTATCTAAATGAT
AGCATCTCTCCTAATGAGAGCATAGATGATGAACATTTGTTAATCCAGCATTACTGCCAAAGTTTGAACCAGGAC
TCCCCCCTGAGCCAGCCTCGTAGTCCTGCCCAGATCTTGATTTCCTTAGAGAGTGAGGAAAGAGGGGAGCTAGAG
AGAATCCTAGCAGATCTTGAGGAAGAAAACAGGAATCTGCAAGCAGAATATGACCGTCTAAAGCAGCAGCACGAA
CATAAAGGCCTGTCCCCACTGCCGTCCCCTCCTGAAATGATGCCCACCTCTCCCCAGAGTCCC
Nterm-R2_R23_R24 to end of dystrophin:
(SEQ ID NO: 26)
ATGCTTTGGTGGGAAGAAGTAGAGGACTGTTATGAAAGAGAAGATGTTCAAAAGAAAACATTCACAAAATGGGTA
AATGCACAATTTTCTAAGTTTGGGAAGCAGCATATTGAGAACCTCTTCAGTGACCTACAGGATGGGAGGCGCCTC
CTAGACCTCCTCGAAGGCCTGACAGGGCAAAAACTGCCAAAAGAAAAAGGATCCACAAGAGTTCATGCCCTGAAC
AATGTCAACAAGGCACTGCGGGTTTTGCAGAACAATAATGTTGATTTAGTGAATATTGGAAGTACTGACATCGTA
GATGGAAATCATAAACTGACTCTTGGTTTGATTTGGAATATAATCCTCCACTGGCAGGTCAAAAATGTAATGAAA
AATATCATGGCTGGATTGCAACAAACCAACAGTGAAAAGATTCTCCTGAGCTGGGTCCGACAATCAACTCGTAAT
TATCCACAGGTTAATGTAATCAACTTCACCACCAGCTGGTCTGATGGCCTGGCTTTGAATGCTCTCATCCATAGT
CATAGGCCAGACCTATTTGACTGGAATAGTGTGGTTTGCCAGCAGTCAGCCACACAACGACTGGAACATGCATTC
AACATCGCCAGATATCAATTAGGCATAGAGAAACTACTCGATCCTGAAGATGTTGATACCACCTATCCAGATAAG
AAGTCCATCTTAATGTACATCACATCACTCTTCCAAGTTTTGCCTCAACAAGTGAGCATTGAAGCCATCCAGGAA
GTGGAAATGTTGCCAAGGCCACCTAAAGTGACTAAAGAAGAACATTTTCAGTTACATCATCAAATGCACTATTCT
CAACAGATCACGGTCAGTCTAGCACAGGGATATGAGAGAACTTCTTCCCCTAAGCCTCGATTCAAGAGCTATGCC
TACACACAGGCTGCTTATGTCACCACCTCTGACCCTACACGGAGCCCATTTCCTTCACAGCATTTGGAAGCTCCT
GAAGACAAGTCATTTGGCAGTTCATTGATGGAGAGTGAAGTAAACCTGGACCGTTATCAAACAGCTTTAGAAGAA
GTATTATCGTGGCTTCTTTCTGCTGAGGACACATTGCAAGCACAAGGAGAGATTTCTAATGATGTGGAAGTGGTG
AAAGACCAGTTTCATACTCATGAGGGGTACATGATGGATTTGACAGCCCATCAGGGCCGGGTTGGTAATATTCTA
CAATTGGGAAGTAAGCTGATTGGAACAGGAAAATTATCAGAAGATGAAGAAACTGAAGTACAAGAGCAGATGAAT
CTCCTAAATTCAAGATGGGAATGCCTCAGGGTAGCTAGCATGGAAAAACAAAGCAATTTACATAGAGTTTTAATG
GATCTCCAGAATCAGAAACTGAAAGAGTTGAATGACTGGCTAACAAAAACAGAAGAAAGAACAAGGAAAATGGAG
GAAGAGCCTCTTGGACCTGATCTTGAAGACCTAAAACGCCAAGTACAACAACATAAGGTGCTTCAAGAAGATCTA
GAACAAGAACAAGTCAGGGTCAATTCTCTCACTCACATGGTGGTGGTAGTTGATGAATCTAGTGGAGATCACGCA
ACTGCTGCTTTGGAAGAACAACTTAAGGTATTGGGAGATCGATGGGCAAACATCTGTAGATGGACAGAAGACCGC
TGGGTTCTTTTACAAGACCACCTTTCTCTGCAGGAACTTCTGGTGTGGCTACAGCTGAAAGATGATGAATTAAGC
CGGCAGGCACCTATTGGAGGCGACTTTCCAGCAGTTCAGAAGCAGAACGATGTACATAGGGCCTTCAAGAGGGAA
TTGAAAACTAAAGAACCTGTAATCATGAGTACTCTTGAGACTGTACGAATATTTCTGACAGAGCAGCCTTTGGAA
GGACTAGAGAAACTCTACCAGGAGCCCAGAGAGCTGCCTCCTGAGGAGAGAGCCCAGAATGTCACTCGGCTTCTA
CGAAAGCAGGCTGAGGAGGTCAATACTGAGTGGGAAAAATTGAACCTGCACTCCGCTGACTGGCAGAGAAAAATA
GATGAGACCCTTGAAAGACTCCGGGAACTTCAAGAGGCCACGGATGAGCTGGACCTCAAGCTGCGCCAAGCTGAG
GTGATCAAGGGATCCTGGCAGCCCGTGGGCGATCTCCTCATTGACTCTCTCCAAGATCACCTCGAGAAAGTCAAG
GCACTTCGAGGAGAAATTGCGCCTCTGAAAGAGAACGTGAGCCACGTCAATGACCTTGCTCGCCAGCTTACCACT
TTGGGCATTCAGCTCTCACCGTATAACCTCAGCACTCTGGAAGACCTGAACACCAGATGGAAGCTTCTGCAGGTG
GCCGTCGAGGACCGAGTCAGGCAGCTGCATGAAGCCCACAGGGACTTTGGTCCAGCATCTCAGCACTTTCTTTCC
ACGTCTGTCCAGGGTCCCTGGGAGAGAGCCATCTCGCCAAACAAAGTGCCCTACTATATCAACCACGAGACTCAA
ACAACTTGCTGGGACCATCCCAAAATGACAGAGCTCTACCAGTCTTTAGCTGACCTGAATAATGTCAGATTCTCA
GCTTATAGGACTGCCATGAAACTCCGAAGACTGCAGAAGGCCCTTTGCTTGGATCTCTTGAGCCTGTCAGCTGCA
TGTGATGCCTTGGACCAGCACAACCTCAAGCAAAATGACCAGCCCATGGATATCCTGCAGATTATTAATTGTTTG
ACCACTATTTATGACCGCCTGGAGCAAGAGCACAACAATTTGGTCAACGTCCCTCTCTGCGTGGATATGTGTCTG
AACTGGCTGCTGAATGTTTATGATACGGGACGAACAGGGAGGATCCGTGTCCTGTCTTTTAAAACTGGCATCATT
TCCCTGTGTAAAGCACATTTGGAAGACAAGTACAGATACCTTTTCAAGCAAGTGGCAAGTTCAACAGGATTTTGT
GACCAGCGCAGGCTGGGCCTCCTTCTGCATGATTCTATCCAAATTCCAAGACAGTTGGGTGAAGTTGCATCCTTT
GGGGGCAGTAACATTGAGCCAAGTGTCCGGAGCTGCTTCCAATTTGCTAATAATAAGCCAGAGATCGAAGCGGCC
CTCTTCCTAGACTGGATGAGACTGGAACCCCAGTCCATGGTGTGGCTGCCCGTCCTGCACAGAGTGGCTGCTGCA
GAAACTGCCAAGCATCAGGCCAAATGTAACATCTGCAAAGAGTGTCCAATCATTGGATTCAGGTACAGGAGTCTA
AAGCACTTTAATTATGACATCTGCCAAAGCTGCTTTTTTTCTGGTCGAGTTGCAAAAGGCCATAAAATGCACTAT
CCCATGGTGGAATATTGCACTCCGACTACATCAGGAGAAGATGTTCGAGACTTTGCCAAGGTACTAAAAAACAAA
TTTCGAACCAAAAGGTATTTTGCGAAGCATCCCCGAATGGGCTACCTGCCAGTGCAGACTGTCTTAGAGGGGGAC
AACATGGAAACTCCC
GTTACTCTGATCAACTTCTGGCCAGTAGATTCTGCGCCTGCCTCGTCCCCTCAGCTTTCACACGATGATACTCAT
TCACGCATTGAACATTATGCTAGCAGGCTAGCAGAAATGGAAAACAGCAATGGATCTTATCTAAATGATAGCATC
TCTCCTAATGAGAGCATAGATGATGAACATTTGTTAATCCAGCATTACTGCCAAAGTTTGAACCAGGACTCCCCC
CTGAGCCAGCCTCGTAGTCCTGCCCAGATCTTGATTTCCTTAGAGAGTGAGGAAAGAGGGGAGCTAGAGAGAATC
CTAGCAGATCTTGAGGAAGAAAACAGGAATCTGCAAGCAGAATATGACCGTCTAAAGCAGCAGCACGAACATAAA
GGCCTGTCCCCACTGCCGTCCCCTCCTGAAATGATGCCCACCTCTCCCCAGAGTCCCCGGGATGCTGAGCTCATT
GCTGAGGCCAAGCTACTGCGTCAACACAAAGGCCGCCTGGAAGCCAGGATGCAAATCCTGGAAGACCACAATAAA
CAGCTGGAGTCACAGTTACACAGGCTAAGGCAGCTGCTGGAGCAACCCCAGGCAGAGGCCAAAGTGAATGGCACA
ACGGTGTCCTCTCCTTCTACCTCTCTACAGAGGTCCGACAGCAGTCAGCCTATGCTGCTCCGAGTGGTTGGCAGT
CAAACTTCGGACTCCATGGGTGAGGAAGATCTTCTCAGTCCTCCCCAGGACACAAGCACAGGGTTAGAGGAGGTG
ATGGAGCAACTCAACAACTCCTTCCCTAGTTCAAGAGGAAGAAATACCCCTGGAAAGCCAATGAGAGAGGACACA
ATG
Nterm-R2_R23_R24 to end of dystrophin:
(SEQ ID NO: 133)
ATGCTTTGGTGGGAAGAAGTAGAGGACTGTTATGAAAGAGAAGATGTTCAAAAGAAAACATTCACAAAATGGGTA
AATGCACAATTTTCTAAGTTTGGGAAGCAGCATATTGAGAACCTCTTCAGTGACCTACAGGATGGGAGGCGCCTC
CTAGACCTCCTCGAAGGCCTGACAGGGCAAAAACTGCCAAAAGAAAAAGGATCCACAAGAGTTCATGCCCTGAAC
AATGTCAACAAGGCACTGCGGGTTTTGCAGAACAATAATGTTGATTTAGTGAATATTGGAAGTACTGACATCGTA
GATGGAAATCATAAACTGACTCTTGGTTTGATTTGGAATATAATCCTCCACTGGCAGGTCAAAAATGTAATGAAA
AATATCATGGCTGGATTGCAACAAACCAACAGTGAAAAGATTCTCCTGAGCTGGGTCCGACAATCAACTCGTAAT
TATCCACAGGTTAATGTAATCAACTTCACCACCAGCTGGTCTGATGGCCTGGCTTTGAATGCTCTCATCCATAGT
CATAGGCCAGACCTATTTGACTGGAATAGTGTGGTTTGCCAGCAGTCAGCCACACAACGACTGGAACATGCATTC
AACATCGCCAGATATCAATTAGGCATAGAGAAACTACTCGATCCTGAAGATGTTGATACCACCTATCCAGATAAG
AAGTCCATCTTAATGTACATCACATCACTCTTCCAAGTTTTGCCTCAACAAGTGAGCATTGAAGCCATCCAGGAA
GTGGAAATGTTGCCAAGGCCACCTAAAGTGACTAAAGAAGAACATTTTCAGTTACATCATCAAATGCACTATTCT
CAACAGATCACGGTCAGTCTAGCACAGGGATATGAGAGAACTTCTTCCCCTAAGCCTCGATTCAAGAGCTATGCC
TACACACAGGCTGCTTATGTCACCACCTCTGACCCTACACGGAGCCCATTTCCTTCACAGCATTTGGAAGCTCCT
GAAGACAAGTCATTTGGCAGTTCATTGATGGAGAGTGAAGTAAACCTGGACCGTTATCAAACAGCTTTAGAAGAA
GTATTATCGTGGCTTCTTTCTGCTGAGGACACATTGCAAGCACAAGGAGAGATTTCTAATGATGTGGAAGTGGTG
AAAGACCAGTTTCATACTCATGAGGGGTACATGATGGATTTGACAGCCCATCAGGGCCGGGTTGGTAATATTCTA
CAATTGGGAAGTAAGCTGATTGGAACAGGAAAATTATCAGAAGATGAAGAAACTGAAGTACAAGAGCAGATGAAT
CTCCTAAATTCAAGATGGGAATGCCTCAGGGTAGCTAGCATGGAAAAACAAAGCAATTTACATAGAGTTTTAATG
GATCTCCAGAATCAGAAACTGAAAGAGTTGAATGACTGGCTAACAAAAACAGAAGAAAGAACAAGGAAAATGGAG
GAAGAGCCTCTTGGACCTGATCTTGAAGACCTAAAACGCCAAGTACAACAACATAAGGTGCTTCAAGAAGATCTA
GAACAAGAACAAGTCAGGGTCAATTCTCTCACTCACATGGTGGTGGTAGTTGATGAATCTAGTGGAGATCACGCA
ACTGCTGCTTTGGAAGAACAACTTAAGGTATTGGGAGATCGATGGGCAAACATCTGTAGATGGACAGAAGACCGC
TGGGTTCTTTTACAAGACGCCAGTTCTGACCAGTGGAAGCGTCTGCACCTTTCTCTGCAGGAACTTCTGGTGTGG
CTACAGCTGAAAGATGATGAATTAAGCCGGCAGGCACCTATTGGAGGCGACTTTCCAGCAGTTCAGAAGCAGAAC
GATGTACATAGGGCCTTCAAGAGGGAATTGAAAACTAAAGAACCTGTAATCATGAGTACTCTTGAGACTGTACGA
ATATTTCTGACAGAGCAGCCTTTGGAAGGACTAGAGAAACTCTACCAGGAGCCCAGAGAGCTGCCTCCTGAGGAG
AGAGCCCAGAATGTCACTCGGCTTCTACGAAAGCAGGCTGAGGAGGTCAATACTGAGTGGGAAAAATTGAACCTG
CACTCCGCTGACTGGCAGAGAAAAATAGATGAGACCCTTGAAAGACTCCGGGAACTTCAAGAGGCCACGGATGAG
CTGGACCTCAAGCTGCGCCAAGCTGAGGTGATCAAGGGATCCTGGCAGCCCGTGGGCGATCTCCTCATTGACTCT
CTCCAAGATCACCTCGAGAAAGTCAAGGCACTTCGAGGAGAAATTGCGCCTCTGAAAGAGAACGTGAGCCACGTC
AATGACCTTGCTCGCCAGCTTACCACTTTGGGCATTCAGCTCTCACCGTATAACCTCAGCACTCTGGAAGACCTG
AACACCAGATGGAAGCTTCTGCAGGTGGCCGTCGAGGACCGAGTCAGGCAGCTGCATGAAGCCCACAGGGACTTT
GGTCCAGCATCTCAGCACTTTCTTTCCACGTCTGTCCAGGGTCCCTGGGAGAGAGCCATCTCGCCAAACAAAGTG
CCCTACTATATCAACCACGAGACTCAAACAACTTGCTGGGACCATCCCAAAATGACAGAGCTCTACCAGTCTTTA
GCTGACCTGAATAATGTCAGATTCTCAGCTTATAGGACTGCCATGAAACTCCGAAGACTGCAGAAGGCCCTTTGC
TTGGATCTCTTGAGCCTGTCAGCTGCATGTGATGCCTTGGACCAGCACAACCTCAAGCAAAATGACCAGCCCATG
GATATCCTGCAGATTATTAATTGTTTGACCACTATTTATGACCGCCTGGAGCAAGAGCACAACAATTTGGTCAAC
GTCCCTCTCTGCGTGGATATGTGTCTGAACTGGCTGCTGAATGTTTATGATACGGGACGAACAGGGAGGATCCGT
GTCCTGTCTTTTAAAACTGGCATCATTTCCCTGTGTAAAGCACATTTGGAAGACAAGTACAGATACCTTTTCAAG
CAAGTGGCAAGTTCAACAGGATTTTGTGACCAGCGCAGGCTGGGCCTCCTTCTGCATGATTCTATCCAAATTCCA
AGACAGTTGGGTGAAGTTGCATCCTTTGGGGGCAGTAACATTGAGCCAAGTGTCCGGAGCTGCTTCCAATTTGCT
AATAATAAGCCAGAGATCGAAGCGGCCCTCTTCCTAGACTGGATGAGACTGGAACCCCAGTCCATGGTGTGGCTG
CCCGTCCTGCACAGAGTGGCTGCTGCAGAAACTGCCAAGCATCAGGCCAAATGTAACATCTGCAAAGAGTGTCCA
ATCATTGGATTCAGGTACAGGAGTCTAAAGCACTTTAATTATGACATCTGCCAAAGCTGCTTTTTTTCTGGTCGA
GTTGCAAAAGGCCATAAAATGCACTATCCCATGGTGGAATATTGCACTCCGACTACATCAGGAGAAGATGTTCGA
GACTTTGCCAAGGTACTAAAAAACAAATTTCGAACCAAAAGGTATTTTGCGAAGCATCCCCGAATGGGCTACCTG
CCAGTGCAGACTGTCTTAGAGGGGGACAACATGGAAACTCCCGTTACTCTGATCAACTTCTGGCCAGTAGATTCT
GCGCCTGCCTCGTCCCCTCAGCTTTCACACGATGATACTCATTCACGCATTGAACATTATGCTAGCAGGCTAGCA
GAAATGGAAAACAGCAATGGATCTTATCTAAATGATAGCATCTCTCCTAATGAGAGCATAGATGATGAACATTTG
TTAATCCAGCATTACTGCCAAAGTTTGAACCAGGACTCCCCCCTGAGCCAGCCTCGTAGTCCTGCCCAGATCTTG
ATTTCCTTAGAGAGTGAGGAAAGAGGGGAGCTAGAGAGAATCCTAGCAGATCTTGAGGAAGAAAACAGGAATCTG
CAAGCAGAATATGACCGTCTAAAGCAGCAGCACGAACATAAAGGCCTGTCCCCACTGCCGTCCCCTCCTGAAATG
ATGCCCACCTCTCCCCAGAGTCCCCGGGATGCTGAGCTCATTGCTGAGGCCAAGCTACTGCGTCAACACAAAGGC
CGCCTGGAAGCCAGGATGCAAATCCTGGAAGACCACAATAAACAGCTGGAGTCACAGTTACACAGGCTAAGGCAG
CTGCTGGAGCAACCCCAGGCAGAGGCCAAAGTGAATGGCACAACGGTGTCCTCTCCTTCTACCTCTCTACAGAGG
TCCGACAGCAGTCAGCCTATGCTGCTCCGAGTGGTTGGCAGTCAAACTTCGGACTCCATGGGTGAGGAAGATCTT
CTCAGTCCTCCCCAGGACACAAGCACAGGGTTAGAGGAGGTGATGGAGCAACTCAACAACTCCTTCCCTAGTTCA
AGAGGAAGAAATACCCCTGGAAAGCCAATGAGAGAGGACACAATG
Nterm-R2_R16-R17_H4 to end:
(SEQ ID NO: 27)
ATGCTTTGGTGGGAAGAAGTAGAGGACTGTTATGAAAGAGAAGATGTTCAAAAGAAAACATTCACAAAATGGGTA
AATGCACAATTTTCTAAGTTTGGGAAGCAGCATATTGAGAACCTCTTCAGTGACCTACAGGATGGGAGGCGCCTC
CTAGACCTCCTCGAAGGCCTGACAGGGCAAAAACTGCCAAAAGAAAAAGGATCCACAAGAGTTCATGCCCTGAAC
AATGTCAACAAGGCACTGCGGGTTTTGCAGAACAATAATGTTGATTTAGTGAATATTGGAAGTACTGACATCGTA
GATGGAAATCATAAACTGACTCTTGGTTTGATTTGGAATATAATCCTCCACTGGCAGGTCAAAAATGTAATGAAA
AATATCATGGCTGGATTGCAACAAACCAACAGTGAAAAGATTCTCCTGAGCTGGGTCCGACAATCAACTCGTAAT
TATCCACAGGTTAATGTAATCAACTTCACCACCAGCTGGTCTGATGGCCTGGCTTTGAATGCTCTCATCCATAGT
CATAGGCCAGACCTATTTGACTGGAATAGTGTGGTTTGCCAGCAGTCAGCCACACAACGACTGGAACATGCATTC
AACATCGCCAGATATCAATTAGGCATAGAGAAACTACTCGATCCTGAAGATGTTGATACCACCTATCCAGATAAG
AAGTCCATCTTAATGTACATCACATCACTCTTCCAAGTTTTGCCTCAACAAGTGAGCATTGAAGCCATCCAGGAA
GTGGAAATGTTGCCAAGGCCACCTAAAGTGACTAAAGAAGAACATTTTCAGTTACATCATCAAATGCACTATTCT
CAACAGATCACGGTCAGTCTAGCACAGGGATATGAGAGAACTTCTTCCCCTAAGCCTCGATTCAAGAGCTATGCC
TACACACAGGCTGCTTATGTCACCACCTCTGACCCTACACGGAGCCCATTTCCTTCACAGCATTTGGAAGCTCCT
GAAGACAAGTCATTTGGCAGTTCATTGATGGAGAGTGAAGTAAACCTGGACCGTTATCAAACAGCTTTAGAAGAA
GTATTATCGTGGCTTCTTTCTGCTGAGGACACATTGCAAGCACAAGGAGAGATTTCTAATGATGTGGAAGTGGTG
AAAGACCAGTTTCATACTCATGAGGGGTACATGATGGATTTGACAGCCCATCAGGGCCGGGTTGGTAATATTCTA
CAATTGGGAAGTAAGCTGATTGGAACAGGAAAATTATCAGAAGATGAAGAAACTGAAGTACAAGAGCAGATGAAT
CTCCTAAATTCAAGATGGGAATGCCTCAGGGTAGCTAGCATGGAAAAACAAAGCAATTTACATAGAGTTTTAATG
GATCTCCAGAATCAGAAACTGAAAGAGTTGAATGACTGGCTAACAAAAACAGAAGAAAGAACAAGGAAAATGGAG
GAAGAGCCTCTTGGACCTGATCTTGAAGACCTAAAACGCCAAGTACAACAACATAAGGTGCTTCAAGAAGATCTA
GAACAAGAACAAGTCAGGGTCAATTCTCTCACTCACATGGTGGTGGTAGTTGATGAATCTAGTGGAGATCACGCA
ACTGCTGCTTTGGAAGAACAACTTAAGGTATTGGGAGATCGATGGGCAAACATCTGTAGATGGACAGAAGACCGC
TGGGTTCTTTTACAAGACCACACTGTCCGTGAAGAAACGATGATGGTGATGACTGAAGACATGCCTTTGGAAATT
TCTTATGTGCCTTCTACTTATTTGACTGAAATCACTCATGTCTCACAAGCCCTATTAGAAGTGGAACAACTTCTC
AATGCTCCTGACCTCTGTGCTAAGGACTTTGAAGATCTCTTTAAGCAAGAGGAGTCTCTGAAGAATATAAAAGAT
AGTCTACAACAAAGCTCAGGTCGGATTGACATTATTCATAGCAAGAAGACAGCAGCATTGCAAAGTGCAACGCCT
GTGGAAAGGGTGAAGCTACAGGAAGCTCTCTCCCAGCTTGATTTCCAATGGGAAAAAGTTAACAAAATGTACAAG
GACCGACAAGGGCGATTTGACAGATCTGTTGAGAAATGGCGGCGTTTTCATTATGATATAAAGATATTTAATCAG
TGGCTAACAGAAGCTGAACAGTTTCTCAGAAAGACACAAATTCCTGAGAATTGGGAACATGCTAAATACAAATGG
TATCTTAAGGAACTCCAGGATGGCATTGGGCAGCGGCAAACTGTTGTCAGAACATTGAATGCAACTGGGGAAGAA
ATAATTCAGCAATCCTCAAAAACAGATGCCAGTATTCTACAGGAAAAATTGGGAAGCCTGAATCTGCGGTGGCAG
GAGGTCTGCAAACAGCTGTCAGACAGAAAAAAGAGGCTAGAAGAACAAAAGGGTCCAGCATCTCAGCACTTTCTT
TCCACGTCTGTCCAGGGTCCCTGGGAGAGAGCCATCTCGCCAAACAAAGTGCCCTACTATATCAACCACGAGACT
CAAACAACTTGCTGGGACCATCCCAAAATGACAGAGCTCTACCAGTCTTTAGCTGACCTGAATAATGTCAGATTC
TCAGCTTATAGGACTGCCATGAAACTCCGAAGACTGCAGAAGGCCCTTTGCTTGGATCTCTTGAGCCTGTCAGCT
GCATGTGATGCCTTGGACCAGCACAACCTCAAGCAAAATGACCAGCCCATGGATATCCTGCAGATTATTAATTGT
TTGACCACTATTTATGACCGCCTGGAGCAAGAGCACAACAATTTGGTCAACGTCCCTCTCTGCGTGGATATGTGT
CTGAACTGGCTGCTGAATGTTTATGATACGGGACGAACAGGGAGGATCCGTGTCCTGTCTTTTAAAACTGGCATC
ATTTCCCTGTGTAAAGCACATTTGGAAGACAAGTACAGATACCTTTTCAAGCAAGTGGCAAGTTCAACAGGATTT
TGTGACCAGCGCAGGCTGGGCCTCCTTCTGCATGATTCTATCCAAATTCCAAGACAGTTGGGTGAAGTTGCATCC
TTTGGGGGCAGTAACATTGAGCCAAGTGTCCGGAGCTGCTTCCAATTTGCTAATAATAAGCCAGAGATCGAAGCG
GCCCTCTTCCTAGACTGGATGAGACTGGAACCCCAGTCCATGGTGTGGCTGCCCGTCCTGCACAGAGTGGCTGCT
GCAGAAACTGCCAAGCATCAGGCCAAATGTAACATCTGCAAAGAGTGTCCAATCATTGGATTCAGGTACAGGAGT
CTAAAGCACTTTAATTATGACATCTGCCAAAGCTGCTTTTTTTCTGGTCGAGTTGCAAAAGGCCATAAAATGCAC
TATCCCATGGTGGAATATTGCACTCCGACTACATCAGGAGAAGATGTTCGAGACTTTGCCAAGGTACTAAAAAAC
AAATTTCGAACCAAAAGGTATTTTGCGAAGCATCCCCGAATGGGCTACCTGCCAGTGCAGACTGTCTTAGAGGGG
GACAACATGGAAACTCCCGTTACTCTGATCAACTTCTGGCCAGTAGATTCTGCGCCTGCCTCGTCCCCTCAGCTT
TCACACGATGATACTCATTCACGCATTGAACATTATGCTAGCAGGCTAGCAGAAATGGAAAACAGCAATGGATCT
TATCTAAATGATAGCATCTCTCCTAATGAGAGCATAGATGATGAACATTTGTTAATCCAGCATTACTGCCAAAGT
TTGAACCAGGACTCCCCCCTGAGCCAGCCTCGTAGTCCTGCCCAGATCTTGATTTCCTTAGAGAGTGAGGAAAGA
GGGGAGCTAGAGAGAATCCTAGCAGATCTTGAGGAAGAAAACAGGAATCTGCAAGCAGAATATGACCGTCTAAAG
CAGCAGCACGAACATAAAGGCCTGTCCCCACTGCCGTCCCCTCCTGAAATGATGCCCACCTCTCCCCAGAGTCCC
CGGGATGCTGAGCTCATTGCTGAGGCCAAGCTACTGCGTCAACACAAAGGCCGCCTGGAAGCCAGGATGCAAATC
CTGGAAGACCACAATAAACAGCTGGAGTCACAGTTACACAGGCTAAGGCAGCTGCTGGAGCAACCCCAGGCAGAG
GCCAAAGTGAATGGCACAACGGTGTCCTCTCCTTCTACCTCTCTACAGAGGTCCGACAGCAGTCAGCCTATGCTG
CTCCGAGTGGTTGGCAGTCAAACTTCGGACTCCATGGGTGAGGAAGATCTTCTCAGTCCTCCCCAGGACACAAGC
ACAGGGTTAGAGGAGGTGATGGAGCAACTCAACAACTCCTTCCCTAGTTCAAGAGGAAGAAATACCCCTGGAAAG
CCAATGAGAGAGGACACAATG
Nterm-R1_R16-R17_R24 to end:
(SEQ ID NO: 28)
ATGCTTTGGTGGGAAGAAGTAGAGGACTGTTATGAAAGAGAAGATGTTCAAAAGAAAACATTCACAAAATGGGTA
AATGCACAATTTTCTAAGTTTGGGAAGCAGCATATTGAGAACCTCTTCAGTGACCTACAGGATGGGAGGCGCCTC
CTAGACCTCCTCGAAGGCCTGACAGGGCAAAAACTGCCAAAAGAAAAAGGATCCACAAGAGTTCATGCCCTGAAC
AATGTCAACAAGGCACTGCGGGTTTTGCAGAACAATAATGTTGATTTAGTGAATATTGGAAGTACTGACATCGTA
GATGGAAATCATAAACTGACTCTTGGTTTGATTTGGAATATAATCCTCCACTGGCAGGTCAAAAATGTAATGAAA
AATATCATGGCTGGATTGCAACAAACCAACAGTGAAAAGATTCTCCTGAGCTGGGTCCGACAATCAACTCGTAAT
TATCCACAGGTTAATGTAATCAACTTCACCACCAGCTGGTCTGATGGCCTGGCTTTGAATGCTCTCATCCATAGT
CATAGGCCAGACCTATTTGACTGGAATAGTGTGGTTTGCCAGCAGTCAGCCACACAACGACTGGAACATGCATTC
AACATCGCCAGATATCAATTAGGCATAGAGAAACTACTCGATCCTGAAGATGTTGATACCACCTATCCAGATAAG
AAGTCCATCTTAATGTACATCACATCACTCTTCCAAGTTTTGCCTCAACAAGTGAGCATTGAAGCCATCCAGGAA
GTGGAAATGTTGCCAAGGCCACCTAAAGTGACTAAAGAAGAACATTTTCAGTTACATCATCAAATGCACTATTCT
CAACAGATCACGGTCAGTCTAGCACAGGGATATGAGAGAACTTCTTCCCCTAAGCCTCGATTCAAGAGCTATGCC
TACACACAGGCTGCTTATGTCACCACCTCTGACCCTACACGGAGCCCATTTCCTTCACAGCATTTGGAAGCTCCT
GAAGACAAGTCATTTGGCAGTTCATTGATGGAGAGTGAAGTAAACCTGGACCGTTATCAAACAGCTTTAGAAGAA
GTATTATCGTGGCTTCTTTCTGCTGAGGACACATTGCAAGCACAAGGAGAGATTTCTAATGATGTGGAAGTGGTG
AAAGACCAGTTTCATACTCATGAGGGGTACATGATGGATTTGACAGCCCATCAGGGCCGGGTTGGTAATATTCTA
CAATTGGGAAGTAAGCTGATTGGAACAGGAAAATTATCAGAAGATGAAGAAACTGAAGTACAAGAGCAGATGAAT
CTCCTAAATTCAAGATGGGAATGCCTCAGGGTAGCTAGCATGGAAAAACAAAGCAATTTACATAGAGTTTTAATG
GATCACACTGTCCGTGAAGAAACGATGATGGTGATGACTGAAGACATGCCTTTGGAAATTTCTTATGTGCCTTCT
ACTTATTTGACTGAAATCACTCATGTCTCACAAGCCCTATTAGAAGTGGAACAACTTCTCAATGCTCCTGACCTC
TGTGCTAAGGACTTTGAAGATCTCTTTAAGCAAGAGGAGTCTCTGAAGAATATAAAAGATAGTCTACAACAAAGC
TCAGGTCGGATTGACATTATTCATAGCAAGAAGACAGCAGCATTGCAAAGTGCAACGCCTGTGGAAAGGGTGAAG
CTACAGGAAGCTCTCTCCCAGCTTGATTTCCAATGGGAAAAAGTTAACAAAATGTACAAGGACCGACAAGGGCGA
TTTGACAGATCTGTTGAGAAATGGCGGCGTTTTCATTATGATATAAAGATATTTAATCAGTGGCTAACAGAAGCT
GAACAGTTTCTCAGAAAGACACAAATTCCTGAGAATTGGGAACATGCTAAATACAAATGGTATCTTAAGGAACTC
CAGGATGGCATTGGGCAGCGGCAAACTGTTGTCAGAACATTGAATGCAACTGGGGAAGAAATAATTCAGCAATCC
TCAAAAACAGATGCCAGTATTCTACAGGAAAAATTGGGAAGCCTGAATCTGCGGTGGCAGGAGGTCTGCAAACAG
CTGTCAGACAGAAAAAAGAGGCTAGAAGAACAAAAGTGGCAGAGAAAAATAGATGAGACCCTTGAAAGACTCCGG
GAACTTCAAGAGGCCACGGATGAGCTGGACCTCAAGCTGCGCCAAGCTGAGGTGATCAAGGGATCCTGGCAGCCC
GTGGGCGATCTCCTCATTGACTCTCTCCAAGATCACCTCGAGAAAGTCAAGGCACTTCGAGGAGAAATTGCGCCT
CTGAAAGAGAACGTGAGCCACGTCAATGACCTTGCTCGCCAGCTTACCACTTTGGGCATTCAGCTCTCACCGTAT
AACCTCAGCACTCTGGAAGACCTGAACACCAGATGGAAGCTTCTGCAGGTGGCCGTCGAGGACCGAGTCAGGCAG
CTGCATGAAGCCCACAGGGACTTTGGTCCAGCATCTCAGCACTTTCTTTCCACGTCTGTCCAGGGTCCCTGGGAG
AGAGCCATCTCGCCAAACAAAGTGCCCTACTATATCAACCACGAGACTCAAACAACTTGCTGGGACCATCCCAAA
ATGACAGAGCTCTACCAGTCTTTAGCTGACCTGAATAATGTCAGATTCTCAGCTTATAGGACTGCCATGAAACTC
CGAAGACTGCAGAAGGCCCTTTGCTTGGATCTCTTGAGCCTGTCAGCTGCATGTGATGCCTTGGACCAGCACAAC
CTCAAGCAAAATGACCAGCCCATGGATATCCTGCAGATTATTAATTGTTTGACCACTATTTATGACCGCCTGGAG
CAAGAGCACAACAATTTGGTCAACGTCCCTCTCTGCGTGGATATGTGTCTGAACTGGCTGCTGAATGTTTATGAT
ACGGGACGAACAGGGAGGATCCGTGTCCTGTCTTTTAAAACTGGCATCATTTCCCTGTGTAAAGCACATTTGGAA
GACAAGTACAGATACCTTTTCAAGCAAGTGGCAAGTTCAACAGGATTTTGTGACCAGCGCAGGCTGGGCCTCCTT
CTGCATGATTCTATCCAAATTCCAAGACAGTTGGGTGAAGTTGCATCCTTTGGGGGCAGTAACATTGAGCCAAGT
GTCCGGAGCTGCTTCCAATTTGCTAATAATAAGCCAGAGATCGAAGCGGCCCTCTTCCTAGACTGGATGAGACTG
GAACCCCAGTCCATGGTGTGGCTGCCCGTCCTGCACAGAGTGGCTGCTGCAGAAACTGCCAAGCATCAGGCCAAA
TGTAACATCTGCAAAGAGTGTCCAATCATTGGATTCAGGTACAGGAGTCTAAAGCACTTTAATTATGACATCTGC
CAAAGCTGCTTTTTTTCTGGTCGAGTTGCAAAAGGCCATAAAATGCACTATCCCATGGTGGAATATTGCACTCCG
ACTACATCAGGAGAAGATGTTCGAGACTTTGCCAAGGTACTAAAAAACAAATTTCGAACCAAAAGGTATTTTGCG
AAGCATCCCCGAATGGGCTACCTGCCAGTGCAGACTGTCTTAGAGGGGGACAACATGGAAACTCCCGTTACTCTG
ATCAACTTCTGGCCAGTAGATTCTGCGCCTGCCTCGTCCCCTCAGCTTTCACACGATGATACTCATTCACGCATT
GAACATTATGCTAGCAGGCTAGCAGAAATGGAAAACAGCAATGGATCTTATCTAAATGATAGCATCTCTCCTAAT
GAGAGCATAGATGATGAACATTTGTTAATCCAGCATTACTGCCAAAGTTTGAACCAGGACTCCCCCCTGAGCCAG
CCTCGTAGTCCTGCCCAGATCTTGATTTCCTTAGAGAGTGAGGAAAGAGGGGAGCTAGAGAGAATCCTAGCAGAT
CTTGAGGAAGAAAACAGGAATCTGCAAGCAGAATATGACCGTCTAAAGCAGCAGCACGAACATAAAGGCCTGTCC
CCACTGCCGTCCCCTCCTGAAATGATGCCCACCTCTCCCCAGAGTCCCCGGGATGCTGAGCTCATTGCTGAGGCC
AAGCTACTGCGTCAACACAAAGGCCGCCTGGAAGCCAGGATGCAAATCCTGGAAGACCACAATAAACAGCTGGAG
TCACAGTTACACAGGCTAAGGCAGCTGCTGGAGCAACCCCAGGCAGAGGCCAAAGTGAATGGCACAACGGTGTCC
TCTCCTTCTACCTCTCTACAGAGGTCCGACAGCAGTCAGCCTATGCTGCTCCGAGTGGTTGGCAGTCAAACTTCG
GACTCCATGGGTGAGGAAGATCTTCTCAGTCCTCCCCAGGACACAAGCACAGGGTTAGAGGAGGTGATGGAGCAA
CTCAACAACTCCTTCCCTAGTTCAAGAGGAAGAAATACCCCTGGAAAGCCAATGAGAGAGGACACAATG
Nterm-R2_R16-R17_R24 to end:
(SEQ ID NO: 29)
ATGCTTTGGTGGGAAGAAGTAGAGGACTGTTATGAAAGAGAAGATGTTCAAAAGAAAACATTCACAAAATGGGTA
AATGCACAATTTTCTAAGTTTGGGAAGCAGCATATTGAGAACCTCTTCAGTGACCTACAGGATGGGAGGCGCCTC
CTAGACCTCCTCGAAGGCCTGACAGGGCAAAAACTGCCAAAAGAAAAAGGATCCACAAGAGTTCATGCCCTGAAC
AATGTCAACAAGGCACTGCGGGTTTTGCAGAACAATAATGTTGATTTAGTGAATATTGGAAGTACTGACATCGTA
GATGGAAATCATAAACTGACTCTTGGTTTGATTTGGAATATAATCCTCCACTGGCAGGTCAAAAATGTAATGAAA
AATATCATGGCTGGATTGCAACAAACCAACAGTGAAAAGATTCTCCTGAGCTGGGTCCGACAATCAACTCGTAAT
TATCCACAGGTTAATGTAATCAACTTCACCACCAGCTGGTCTGATGGCCTGGCTTTGAATGCTCTCATCCATAGT
CATAGGCCAGACCTATTTGACTGGAATAGTGTGGTTTGCCAGCAGTCAGCCACACAACGACTGGAACATGCATTC
AACATCGCCAGATATCAATTAGGCATAGAGAAACTACTCGATCCTGAAGATGTTGATACCACCTATCCAGATAAG
AAGTCCATCTTAATGTACATCACATCACTCTTCCAAGTTTTGCCTCAACAAGTGAGCATTGAAGCCATCCAGGAA
GTGGAAATGTTGCCAAGGCCACCTAAAGTGACTAAAGAAGAACATTTTCAGTTACATCATCAAATGCACTATTCT
CAACAGATCACGGTCAGTCTAGCACAGGGATATGAGAGAACTTCTTCCCCTAAGCCTCGATTCAAGAGCTATGCC
TACACACAGGCTGCTTATGTCACCACCTCTGACCCTACACGGAGCCCATTTCCTTCACAGCATTTGGAAGCTCCT
GAAGACAAGTCATTTGGCAGTTCATTGATGGAGAGTGAAGTAAACCTGGACCGTTATCAAACAGCTTTAGAAGAA
GTATTATCGTGGCTTCTTTCTGCTGAGGACACATTGCAAGCACAAGGAGAGATTTCTAATGATGTGGAAGTGGTG
AAAGACCAGTTTCATACTCATGAGGGGTACATGATGGATTTGACAGCCCATCAGGGCCGGGTTGGTAATATTCTA
CAATTGGGAAGTAAGCTGATTGGAACAGGAAAATTATCAGAAGATGAAGAAACTGAAGTACAAGAGCAGATGAAT
CTCCTAAATTCAAGATGGGAATGCCTCAGGGTAGCTAGCATGGAAAAACAAAGCAATTTACATAGAGTTTTAATG
GATCTCCAGAATCAGAAACTGAAAGAGTTGAATGACTGGCTAACAAAAACAGAAGAAAGAACAAGGAAAATGGAG
GAAGAGCCTCTTGGACCTGATCTTGAAGACCTAAAACGCCAAGTACAACAACATAAGGTGCTTCAAGAAGATCTA
GAACAAGAACAAGTCAGGGTCAATTCTCTCACTCACATGGTGGTGGTAGITGATGAATCTAGTGGAGATCACGCA
ACTGCTGCTTTGGAAGAACAACTTAAGGTATTGGGAGATCGATGGGCAAACATCTGTAGATGGACAGAAGACCGC
TGGGTTCTTTTACAAGACCACACTGTCCGTGAAGAAACGATGATGGTGATGACTGAAGACATGCCTTTGGAAATT
TCTTATGTGCCTTCTACTTATTTGACTGAAATCACTCATGTCTCACAAGCCCTATTAGAAGTGGAACAACTTCTC
AATGCTCCTGACCTCTGTGCTAAGGACTTTGAAGATCTCTTTAAGCAAGAGGAGTCTCTGAAGAATATAAAAGAT
AGTCTACAACAAAGCTCAGGTCGGATTGACATTATTCATAGCAAGAAGACAGCAGCATTGCAAAGTGCAACGCCT
GTGGAAAGGGTGAAGCTACAGGAAGCTCTCTCCCAGCTTGATTTCCAATGGGAAAAAGTTAACAAAATGTACAAG
GACCGACAAGGGCGATTTGACAGATCTGTTGAGAAATGGCGGCGTTTTCATTATGATATAAAGATATTTAATCAG
TGGCTAACAGAAGCTGAACAGTTTCTCAGAAAGACACAAATTCCTGAGAATTGGGAACATGCTAAATACAAATGG
TATCTTAAGGAACTCCAGGATGGCATTGGGCAGCGGCAAACTGTTGTCAGAACATTGAATGCAACTGGGGAAGAA
ATAATTCAGCAATCCTCAAAAACAGATGCCAGTATTCTACAGGAAAAATTGGGAAGCCTGAATCTGCGGTGGCAG
GAGGTCTGCAAACAGCTGTCAGACAGAAAAAAGAGGCTAGAAGAACAAAAGTGGCAGAGAAAAATAGATGAGACC
CTTGAAAGACTCCGGGAACTTCAAGAGGCCACGGATGAGCTGGACCTCAAGCTGCGCCAAGCTGAGGTGATCAAG
GGATCCTGGCAGCCCGTGGGCGATCTCCTCATTGACTCTCTCCAAGATCACCTCGAGAAAGTCAAGGCACTTCGA
GGAGAAATTGCGCCTCTGAAAGAGAACGTGAGCCACGTCAATGACCTTGCTCGCCAGCTTACCACTTTGGGCATT
CAGCTCTCACCGTATAACCTCAGCACTCTGGAAGACCTGAACACCAGATGGAAGCTTCTGCAGGTGGCCGTCGAG
GACCGAGTCAGGCAGCTGCATGAAGCCCACAGGGACTTTGGTCCAGCATCTCAGCACTTTCTTTCCACGTCTGTC
CAGGGTCCCTGGGAGAGAGCCATCTCGCCAAACAAAGTGCCCTACTATATCAACCACGAGACTCAAACAACTTGC
TGGGACCATCCCAAAATGACAGAGCTCTACCAGTCTTTAGCTGACCTGAATAATGTCAGATTCTCAGCTTATAGG
ACTGCCATGAAACTCCGAAGACTGCAGAAGGCCCTTTGCTTGGATCTCTTGAGCCTGTCAGCTGCATGTGATGCC
TTGGACCAGCACAACCTCAAGCAAAATGACCAGCCCATGGATATCCTGCAGATTATTAATTGTTTGACCACTATT
TATGACCGCCTGGAGCAAGAGCACAACAATTTGGTCAACGTCCCTCTCTGCGTGGATATGTGTCTGAACTGGCTG
CTGAATGTTTATGATACGGGACGAACAGGGAGGATCCGTGTCCTGTCTTTTAAAACTGGCATCATTTCCCTGTGT
AAAGCACATTTGGAAGACAAGTACAGATACCTTTTCAAGCAAGTGGCAAGTTCAACAGGATTTTGTGACCAGCGC
AGGCTGGGCCTCCTTCTGCATGATTCTATCCAAATTCCAAGACAGTTGGGTGAAGTTGCATCCTTTGGGGGCAGT
AACATTGAGCCAAGTGTCCGGAGCTGCTTCCAATTTGCTAATAATAAGCCAGAGATCGAAGCGGCCCTCTTCCTA
GACTGGATGAGACTGGAACCCCAGTCCATGGTGTGGCTGCCCGTCCTGCACAGAGTGGCTGCTGCAGAAACTGCC
AAGCATCAGGCCAAATGTAACATCTGCAAAGAGTGTCCAATCATTGGATTCAGGTACAGGAGTCTAAAGCACTTT
AATTATGACATCTGCCAAAGCTGCTTTTTTTCTGGTCGAGTTGCAAAAGGCCATAAAATGCACTATCCCATGGTG
GAATATTGCACTCCGACTACATCAGGAGAAGATGTTCGAGACTTTGCCAAGGTACTAAAAAACAAATTTCGAACC
AAAAGGTATTTTGCGAAGCATCCCCGAATGGGCTACCTGCCAGTGCAGACTGTCTTAGAGGGGGACAACATGGAA
ACTCCCGTTACTCTGATCAACTTCTGGCCAGTAGATTCTGCGCCTGCCTCGTCCCCTCAGCTTTCACACGATGAT
ACTCATTCACGCATTGAACATTATGCTAGCAGGCTAGCAGAAATGGAAAACAGCAATGGATCTTATCTAAATGAT
AGCATCTCTCCTAATGAGAGCATAGATGATGAACATTTGTTAATCCAGCATTACTGCCAAAGTTTGAACCAGGAC
TCCCCCCTGAGCCAGCCTCGTAGTCCTGCCCAGATCTTGATTTCCTTAGAGAGTGAGGAAAGAGGGGAGCTAGAG
AGAATCCTAGCAGATCTTGAGGAAGAAAACAGGAATCTGCAAGCAGAATATGACCGTCTAAAGCAGCAGCACGAA
CATAAAGGCCTGTCCCCACTGCCGTCCCCTCCTGAAATGATGCCCACCTCTCCCCAGAGTCCCCGGGATGCTGAG
CTCATTGCTGAGGCCAAGCTACTGCGTCAACACAAAGGCCGCCTGGAAGCCAGGATGCAAATCCTGGAAGACCAC
AATAAACAGCTGGAGTCACAGTTACACAGGCTAAGGCAGCTGCTGGAGCAACCCCAGGCAGAGGCCAAAGTGAAT
GGCACAACGGTGTCCTCTCCTTCTACCTCTCTACAGAGGTCCGACAGCAGTCAGCCTATGCTGCTCCGAGTGGTT
GGCAGTCAAACTTCGGACTCCATGGGTGAGGAAGATCTTCTCAGTCCTCCCCAGGACACAAGCACAGGGTTAGAG
GAGGTGATGGAGCAACTCAACAACTCCTTCCCTAGTTCAAGAGGAAGAAATACCCCTGGAAAGCCAATGAGAGAG
GACACAATG
Nterm-R2_R16-R17_R24 to end of syntrophin region:
(SEQ ID NO: 30)
ATGCTTTGGTGGGAAGAAGTAGAGGACTGTTATGAAAGAGAAGATGTTCAAAAGAAAACATTCACAAAATGGGTA
AATGCACAATTTTCTAAGTTTGGGAAGCAGCATATTGAGAACCTCTTCAGTGACCTACAGGATGGGAGGCGCCTC
CTAGACCTCCTCGAAGGCCTGACAGGGCAAAAACTGCCAAAAGAAAAAGGATCCACAAGAGTTCATGCCCTGAAC
AATGTCAACAAGGCACTGCGGGTTTTGCAGAACAATAATGTTGATTTAGTGAATATTGGAAGTACTGACATCGTA
GATGGAAATCATAAACTGACTCTTGGTTTGATTTGGAATATAATCCTCCACTGGCAGGTCAAAAATGTAATGAAA
AATATCATGGCTGGATTGCAACAAACCAACAGTGAAAAGATTCTCCTGAGCTGGGTCCGACAATCAACTCGTAAT
TATCCACAGGTTAATGTAATCAACTTCACCACCAGCTGGTCTGATGGCCTGGCTTTGAATGCTCTCATCCATAGT
CATAGGCCAGACCTATTTGACTGGAATAGTGTGGTTTGCCAGCAGTCAGCCACACAACGACTGGAACATGCATTC
AACATCGCCAGATATCAATTAGGCATAGAGAAACTACTCGATCCTGAAGATGTTGATACCACCTATCCAGATAAG
AAGTCCATCTTAATGTACATCACATCACTCTTCCAAGTTTTGCCTCAACAAGTGAGCATTGAAGCCATCCAGGAA
GTGGAAATGTTGCCAAGGCCACCTAAAGTGACTAAAGAAGAACATTTTCAGTTACATCATCAAATGCACTATTCT
CAACAGATCACGGTCAGTCTAGCACAGGGATATGAGAGAACTTCTTCCCCTAAGCCTCGATTCAAGAGCTATGCC
TACACACAGGCTGCTTATGTCACCACCTCTGACCCTACACGGAGCCCATTTCCTTCACAGCATTTGGAAGCTCCT
GAAGACAAGTCATTTGGCAGTTCATTGATGGAGAGTGAAGTAAACCTGGACCGTTATCAAACAGCTTTAGAAGAA
GTATTATCGTGGCTTCTTTCTGCTGAGGACACATTGCAAGCACAAGGAGAGATTTCTAATGATGTGGAAGTGGTG
AAAGACCAGTTTCATACTCATGAGGGGTACATGATGGATTTGACAGCCCATCAGGGCCGGGTTGGTAATATTCTA
CAATTGGGAAGTAAGCTGATTGGAACAGGAAAATTATCAGAAGATGAAGAAACTGAAGTACAAGAGCAGATGAAT
CTCCTAAATTCAAGATGGGAATGCCTCAGGGTAGCTAGCATGGAAAAACAAAGCAATTTACATAGAGTTTTAATG
GATCTCCAGAATCAGAAACTGAAAGAGTTGAATGACTGGCTAACAAAAACAGAAGAAAGAACAAGGAAAATGGAG
GAAGAGCCTCTTGGACCTGATCTTGAAGACCTAAAACGCCAAGTACAACAACATAAGGTGCTTCAAGAAGATCTA
GAACAAGAACAAGTCAGGGTCAATTCTCTCACTCACATGGTGGTGGTAGTTGATGAATCTAGTGGAGATCACGCA
ACTGCTGCTTTGGAAGAACAACTTAAGGTATTGGGAGATCGATGGGCAAACATCTGTAGATGGACAGAAGACCGC
TGGGTTCTTTTACAAGACCACACTGTCCGTGAAGAAACGATGATGGTGATGACTGAAGACATGCCTTTGGAAATT
TCTTATGTGCCTTCTACTTATTTGACTGAAATCACTCATGTCTCACAAGCCCTATTAGAAGTGGAACAACTTCTC
AATGCTCCTGACCTCTGTGCTAAGGACTTTGAAGATCTCTTTAAGCAAGAGGAGTCTCTGAAGAATATAAAAGAT
AGTCTACAACAAAGCTCAGGTCGGATTGACATTATTCATAGCAAGAAGACAGCAGCATTGCAAAGTGCAACGCCT
GTGGAAAGGGTGAAGCTACAGGAAGCTCTCTCCCAGCTTGATTTCCAATGGGAAAAAGTTAACAAAATGTACAAG
GACCGACAAGGGCGATTTGACAGATCTGTTGAGAAATGGCGGCGTTTTCATTATGATATAAAGATATTTAATCAG
TGGCTAACAGAAGCTGAACAGTTTCTCAGAAAGACACAAATTCCTGAGAATTGGGAACATGCTAAATACAAATGG
TATCTTAAGGAACTCCAGGATGGCATTGGGCAGCGGCAAACTGTTGTCAGAACATTGAATGCAACTGGGGAAGAA
ATAATTCAGCAATCCTCAAAAACAGATGCCAGTATTCTACAGGAAAAATTGGGAAGCCTGAATCTGCGGTGGCAG
GAGGTCTGCAAACAGCTGTCAGACAGAAAAAAGAGGCTAGAAGAACAAAAGTGGCAGAGAAAAATAGATGAGACC
CTTGAAAGACTCCGGGAACTTCAAGAGGCCACGGATGAGCTGGACCTCAAGCTGCGCCAAGCTGAGGTGATCAAG
GGATCCTGGCAGCCCGTGGGCGATCTCCTCATTGACTCTCTCCAAGATCACCTCGAGAAAGTCAAGGCACTTCGA
GGAGAAATTGCGCCTCTGAAAGAGAACGTGAGCCACGTCAATGACCTTGCTCGCCAGCTTACCACTTTGGGCATT
CAGCTCTCACCGTATAACCTCAGCACTCTGGAAGACCTGAACACCAGATGGAAGCTTCTGCAGGTGGCCGTCGAG
GACCGAGTCAGGCAGCTGCATGAAGCCCACAGGGACTTTGGTCCAGCATCTCAGCACTTTCTTTCCACGTCTGTC
CAGGGTCCCTGGGAGAGAGCCATCTCGCCAAACAAAGTGCCCTACTATATCAACCACGAGACTCAAACAACTTGC
TGGGACCATCCCAAAATGACAGAGCTCTACCAGTCTTTAGCTGACCTGAATAATGTCAGATTCTCAGCTTATAGG
ACTGCCATGAAACTCCGAAGACTGCAGAAGGCCCTTTGCTTGGATCTCTTGAGCCTGTCAGCTGCATGTGATGCC
TTGGACCAGCACAACCTCAAGCAAAATGACCAGCCCATGGATATCCTGCAGATTATTAATTGTTTGACCACTATT
TATGACCGCCTGGAGCAAGAGCACAACAATTTGGTCAACGTCCCTCTCTGCGTGGATATGTGTCTGAACTGGCTG
CTGAATGTTTATGATACGGGACGAACAGGGAGGATCCGTGTCCTGTCTTTTAAAACTGGCATCATTTCCCTGTGT
AAAGCACATTTGGAAGACAAGTACAGATACCTTTTCAAGCAAGTGGCAAGTTCAACAGGATTTTGTGACCAGCGC
AGGCTGGGCCTCCTTCTGCATGATTCTATCCAAATTCCAAGACAGTTGGGTGAAGTTGCATCCTTTGGGGGCAGT
AACATTGAGCCAAGTGTCCGGAGCTGCTTCCAATTTGCTAATAATAAGCCAGAGATCGAAGCGGCCCTCTTCCTA
GACTGGATGAGACTGGAACCCCAGTCCATGGTGTGGCTGCCCGTCCTGCACAGAGTGGCTGCTGCAGAAACTGCC
AAGCATCAGGCCAAATGTAACATCTGCAAAGAGTGTCCAATCATTGGATTCAGGTACAGGAGTCTAAAGCACTTT
AATTATGACATCTGCCAAAGCTGCTTTTTTTCTGGTCGAGTTGCAAAAGGCCATAAAATGCACTATCCCATGGTG
GAATATTGCACTCCGACTACATCAGGAGAAGATGTTCGAGACTTTGCCAAGGTACTAAAAAACAAATTTCGAACC
AAAAGGTATTTTGCGAAGCATCCCCGAATGGGCTACCTGCCAGTGCAGACTGTCTTAGAGGGGGACAACATGGAA
ACTCCCGTTACTCTGATCAACTTCTGGCCAGTAGATTCTGCGCCTGCCTCGTCCCCTCAGCTTTCACACGATGAT
ACTCATTCACGCATTGAACATTATGCTAGCAGGCTAGCAGAAATGGAAAACAGCAATGGATCTTATCTAAATGAT
AGCATCTCTCCTAATGAGAGCATAGATGATGAACATTTGTTAATCCAGCATTACTGCCAAAGTTTGAACCAGGAC
TCCCCCCTGAGCCAGCCTCGTAGT

[0113] In some embodiments, a micro-dystrophin protein as described herein further comprises one or more utrophin protein domains.

[0114] Non-limiting examples of codon optimized nucleotide sequences encoding human micro-dystrophin proteins optimized for skeletal muscle are described below.

Nterm-R2_R16-R17_R24 + H4 + trCterm:
(SEQ ID NO: 31)
ATGCTGTGGTGGGAGGAGGTGGAGGACTGCTACGAGCGGGAGGACGTGCAGAAGAAGACCTTCACCAAGTGGGTG
AACGCCCAGTTCAGCAAGTTCGGCAAGCAGCACATCGAGAACCTGTTCAGCGACCTGCAGGACGGCCGGCGGCTG
CTGGACCTGCTGGAGGGCCTGACCGGCCAGAAGCTGCCCAAGGAGAAGGGCAGCACCCGGGTGCACGCCCTGAAC
AACGTGAACAAGGCCCTGCGGGTGCTGCAGAACAACAACGTGGACCTGGTGAACATCGGCAGCACCGACATCGTG
GACGGCAACCACAAGCTGACCCTGGGCCTGATCTGGAACATCATCCTGCACTGGCAGGTGAAGAACGTGATGAAG
AACATCATGGCCGGCCTGCAGCAGACCAACAGCGAGAAGATCCTGCTGAGCTGGGTGCGGCAGAGCACCCGGAAC
TACCCCCAGGTGAACGTGATCAACTTCACCACCAGCTGGAGCGACGGCCTGGCCCTGAACGCCCTGATCCACAGC
CACCGGCCCGACCTGTTCGACTGGAACAGCGTGGTGTGCCAGCAGAGCGCCACCCAGCGGCTGGAGCACGCCTTC
AACATCGCCCGGTACCAGCTGGGCATCGAGAAGCTGCTGGACCCCGAGGACGTGGACACCACCTACCCCGACAAG
AAGAGCATCCTGATGTACATCACCAGCCTGTTCCAGGTGCTGCCCCAGCAGGTGAGCATCGAGGCCATCCAGGAG
GTGGAGATGCTGCCCCGGCCCCCCAAGGTGACCAAGGAGGAGCACTTCCAGCTGCACCACCAGATGCACTACAGC
CAGCAGATCACCGTGAGCCTGGCCCAGGGCTACGAGCGGACCAGCAGCCCCAAGCCCCGGTTCAAGAGCTACGCC
TACACCCAGGCCGCCTACGTGACCACCAGCGACCCCACCCGGAGCCCCTTCCCCAGCCAGCACCTGGAGGCCCCC
GAGGACAAGAGCTTCGGCAGCAGCCTGATGGAGAGCGAGGTGAACCTGGACCGGTACCAGACCGCCCTGGAGGAG
GTGCTGAGCTGGCTGCTGAGCGCCGAGGACACCCTGCAGGCCCAGGGCGAGATCAGCAACGACGTGGAGGTGGTG
AAGGACCAGTTCCACACCCACGAGGGCTACATGATGGACCTGACCGCCCACCAGGGCCGGGGGGCAACATCCTG
CAGCTGGGCAGCAAGCTGATCGGCACCGGCAAGCTGAGCGAGGACGAGGAGACCGAGGTGCAGGAGCAGATGAAC
CTGCTGAACAGCCGGTGGGAGTGCCTGCGGGTGGCCAGCATGGAGAAGCAGAGCAACCTGCACCGGGTGCTGATG
GACCTGCAGAACCAGAAGCTGAAGGAGCTGAACGACTGGCTGACCAAGACCGAGGAGCGGACCCGGAAGATGGAG
GAGGAGCCCCTGGGCCCCGACCTGGAGGACCTGAAGCGGCAGGTGCAGCAGCACAAGGTGCTGCAGGAGGACCTG
GAGCAGGAGCAGGTGCGGGTGAACAGCCTGACCCACATGGTGGTGGTGGTGGACGAGAGCAGCGGCGACCACGCC
ACCGCCGCCCTGGAGGAGCAGCTGAAGGTGCTGGGCGACCGGTGGGCCAACATCTGCCGGTGGACCGAGGACCGG
TGGGTGCTGCTGCAGGACCACACCGTGCGGGAGGAGACCATGATGGTGATGACCGAGGACATGCCCCTGGAGATC
AGCTACGTGCCCAGCACCTACCTGACCGAGATCACCCACGTGAGCCAGGCCCTGCTGGAGGTGGAGCAGCTGCTG
AACGCCCCCGACCTGTGCGCCAAGGACTTCGAGGACCTGTTCAAGCAGGAGGAGAGCCTGAAGAACATCAAGGAC
AGCCTGCAGCAGAGCAGCGGCCGGATCGACATCATCCACAGCAAGAAGACCGCCGCCCTGCAGAGCGCCACCCCC
GTGGAGCGGGTGAAGCTGCAGGAGGCCCTGAGCCAGCTGGACTTCCAGTGGGAGAAGGTGAACAAGATGTACAAG
GACCGGCAGGGCCGGTTCGACCGGAGCGTGGAGAAGTGGCGGCGGTTCCACTACGACATCAAGATCTTCAACCAG
TGGCTGACCGAGGCCGAGCAGTTCCTGCGGAAGACCCAGATCCCCGAGAACTGGGAGCACGCCAAGTACAAGTGG
TACCTGAAGGAGCTGCAGGACGGCATCGGCCAGCGGCAGACCGTGGTGCGGACCCTGAACGCCACCGGCGAGGAG
ATCATCCAGCAGAGCAGCAAGACCGACGCCAGCATCCTGCAGGAGAAGCTGGGCAGCCTGAACCTGCGGTGGCAG
GAGGTGTGCAAGCAGCTGAGCGACCGGAAGAAGCGGCTGGAGGAGCAGAAGTGGCAGCGGAAGATCGACGAGACC
CTGGAGCGGCTGCAGGAGCTGCAGGAGGCCACCGACGAGCTGGACCTGAAGCTGCGGCAGGCCGAGGTGATCAAG
GGCAGCTGGCAGCCCGTGGGCGACCTGCTGATCGACAGCCTGCAGGACCACCTGGAGAAGGTGAAGGCCCTGCGG
GGCGAGATCGCCCCCCTGAAGGAGAACGTGAGCCACGTGAACGACCTGGCCCGGCAGCTGACCACCCTGGGCATC
CAGCTGAGCCCCTACAACCTGAGCACCCTGGAGGACCTGAACACCCGGTGGAAGCTGCTGCAGGTGGCCGTGGAG
GACCGGGTGCGGCAGCTGCACGAGGCCCACCGGGACTTCGGCCCCGCCAGCCAGCACTTCCTGAGCACCAGCGTG
CAGGGCCCCTGGGAGCGGGCCATCAGCCCCAACAAGGTGCCCTACTACATCAACCACGAGACCCAGACCACCTGC
TGGGACCACCCCAAGATGACCGAGCTGTACCAGAGCCTGGCCGACCTGAACAACGTGCGGTTCAGCGCCTACCGG
ACCGCCATGAAGCTGCGGCGGCTGCAGAAGGCCCTGTGCCTGGACCTGCTGAGCCTGAGCGCCGCCTGCGACGCC
CTGGACCAGCACAACCTGAAGCAGAACGACCAGCCCATGGACATCCTGCAGATCATCAACTGCCTGACCACCATC
TACGACCGGCTGGAGCAGGAGCACAACAACCTGGTGAACGTGCCCCTGTGCGTGGACATGTGCCTGAACTGGCTG
CTGAACGTGTACGACACCGGCCGGACCGGCCGGATCCGGGTGCTGAGCTTCAAGACCGGCATCATCAGCCTGTGC
AAGGCCCACCTGGAGGACAAGTACCGGTACCTGTTCAAGCAGGTGGCCAGCAGCACCGGCTTCTGCGACCAGCGG
CGGCTGGGCCTGCTGCTGCACGACAGCATCCAGATCCCCCGGCAGCTGGGCGAGGTGGCCAGCTTCGGCGGCAGC
AACATCGAGCCCAGCGTGCGGAGCTGCTTCCAGTTCGCCAACAACAAGCCCGAGATCGAGGCCGCCCTGTTCCTG
GACTGGATGCGGCTGGAGCCCCAGAGCATGGTGTGGCTGCCCGTGCTGCACCGGGTGGCCGCCGCCGAGACCGCC
AAGCACCAGGCCAAGTGCAACATCTGCAAGGAGTGCCCCATCATCGGCTTCCGGTACCGGAGCCTGAAGCACTTC
AACTACGACATCTGCCAGAGCTGCTTCTTCAGCGGCCGGGTGGCCAAGGGCCACAAGATGCACTACCCCATGGTG
GAGTACTGCACCCCCACCACCAGCGGCGAGGACGTGCGGGACTTCGCCAAGGTGCTGAAGAACAAGTTCCGGACC
AAGCGGTACTTCGCCAAGCACCCCCGGATGGGCTACCTGCCCGTGCAGACCGTGCTGGAGGGCGACAACATGGAG
ACCCCC
Nterm-R2_R16-R17_H4 to end of syntrophin region:
(SEQ ID NO: 32)
ATGCTGTGGTGGGAGGAGGTGGAGGACTGCTACGAGCGGGAGGACGTGCAGAAGAAGACCTTCACCAAGTGGGTG
AACGCCCAGTTCAGCAAGTTCGGCAAGCAGCACATCGAGAACCTGTTCAGCGACCTGCAGGACGGCCGGCGGCTG
CTGGACCTGCTGGAGGGCCTGACCGGCCAGAAGCTGCCCAAGGAGAAGGGCAGCACCCGGGTGCACGCCCTGAAC
AACGTGAACAAGGCCCTGCGGGTGCTGCAGAACAACAACGTGGACCTGGTGAACATCGGCAGCACCGACATCGTG
GACGGCAACCACAAGCTGACCCTGGGCCTGATCTGGAACATCATCCTGCACTGGCAGGTGAAGAACGTGATGAAG
AACATCATGGCCGGCCTGCAGCAGACCAACAGCGAGAAGATCCTGCTGAGCTGGGTGCGGCAGAGCACCCGGAAC
TACCCCCAGGTGAACGTGATCAACTTCACCACCAGCTGGAGCGACGGCCTGGCCCTGAACGCCCTGATCCACAGC
CACCGGCCCGACCTGTTCGACTGGAACAGCGTGGTGTGCCAGCAGAGCGCCACCCAGCGGCTGGAGCACGCCTTC
AACATCGCCCGGTACCAGCTGGGCATCGAGAAGCTGCTGGACCCCGAGGACGTGGACACCACCTACCCCGACAAG
AAGAGCATCCTGATGTACATCACCAGCCTGTTCCAGGTGCTGCCCCAGCAGGTGAGCATCGAGGCCATCCAGGAG
GTGGAGATGCTGCCCCGGCCCCCCAAGGTGACCAAGGAGGAGCACTTCCAGCTGCACCACCAGATGCACTACAGC
CAGCAGATCACCGTGAGCCTGGCCCAGGGCTACGAGCGGACCAGCAGCCCCAAGCCCCGGTTCAAGAGCTACGCC
TACACCCAGGCCGCCTACGTGACCACCAGCGACCCCACCCGGAGCCCCTTCCCCAGCCAGCACCTGGAGGCCCCC
GAGGACAAGAGCTTCGGCAGCAGCCTGATGGAGAGCGAGGTGAACCTGGACCGGTACCAGACCGCCCTGGAGGAG
GTGCTGAGCTGGCTGCTGAGCGCCGAGGACACCCTGCAGGCCCAGGGCGAGATCAGCAACGACGTGGAGGTGGTG
AAGGACCAGTTCCACACCCACGAGGGCTACATGATGGACCTGACCGCCCACCAGGGCCGGGTGGGCAACATCCTG
CAGCTGGGCAGCAAGCTGATCGGCACCGGCAAGCTGAGCGAGGACGAGGAGACCGAGGTGCAGGAGCAGATGAAC
CTGCTGAACAGCCGGTGGGAGTGCCTGCGGGTGGCCAGCATGGAGAAGCAGAGCAACCTGCACCGGGTGCTGATG
GACCTGCAGAACCAGAAGCTGAAGGAGCTGAACGACTGGCTGACCAAGACCGAGGAGCGGACCCGGAAGATGGAG
GAGGAGCCCCTGGGCCCCGACCTGGAGGACCTGAAGCGGCAGGTGCAGCAGCACAAGGTGCTGCAGGAGGACCTG
GAGCAGGAGCAGGTGCGGGTGAACAGCCTGACCCACATGGTGGTGGTGGTGGACGAGAGCAGCGGCGACCACGCC
ACCGCCGCCCTGGAGGAGCAGCTGAAGGTGCTGGGCGACCGGTGGGCCAACATCTGCCGGTGGACCGAGGACCGG
TGGGTGCTGCTGCAGGACCACACCGTGCGGGAGGAGACCATGATGGTGATGACCGAGGACATGCCCCTGGAGATC
AGCTACGTGCCCAGCACCTACCTGACCGAGATCACCCACGTGAGCCAGGCCCTGCTGGAGGTGGAGCAGCTGCTG
AACGCCCCCGACCTGTGCGCCAAGGACTTCGAGGACCTGTTCAAGCAGGAGGAGAGCCTGAAGAACATCAAGGAC
AGCCTGCAGCAGAGCAGCGGCCGGATCGACATCATCCACAGCAAGAAGACCGCCGCCCTGCAGAGCGCCACCCCC
GTGGAGCGGGTGAAGCTGCAGGAGGCCCTGAGCCAGCTGGACTTCCAGTGGGAGAAGGTGAACAAGATGTACAAG
GACCGGCAGGGCCGGTTCGACCGGAGCGTGGAGAAGTGGCGGCGGTTCCACTACGACATCAAGATCTTCAACCAG
TGGCTGACCGAGGCCGAGCAGTTCCTGCGGAAGACCCAGATCCCCGAGAACTGGGAGCACGCCAAGTACAAGTGG
TACCTGAAGGAGCTGCAGGACGGCATCGGCCAGCGGCAGACCGTGGTGCGGACCCTGAACGCCACCGGCGAGGAG
ATCATCCAGCAGAGCAGCAAGACCGACGCCAGCATCCTGCAGGAGAAGCTGGGCAGCCTGAACCTGCGGTGGCAG
GAGGTGTGCAAGCAGCTGAGCGACCGGAAGAAGCGGCTGGAGGAGCAGAAGGGCCCCGCCAGCCAGCACTTCCTG
AGCACCAGCGTGCAGGGCCCCTGGGAGCGGGCCATCAGCCCCAACAAGGTGCCCTACTACATCAACCACGAGACC
CAGACCACCTGCTGGGACCACCCCAAGATGACCGAGCTGTACCAGAGCCTGGCCGACCTGAACAACGTGCGGTTC
AGCGCCTACCGGACCGCCATGAAGCTGCGGCGGCTGCAGAAGGCCCTGTGCCTGGACCTGCTGAGCCTGAGCGCC
GCCTGCGACGCCCTGGACCAGCACAACCTGAAGCAGAACGACCAGCCCATGGACATCCTGCAGATCATCAACTGC
CTGACCACCATCTACGACCGGCTGGAGCAGGAGCACAACAACCTGGTGAACGTGCCCCTGTGCGTGGACATGTGC
CTGAACTGGCTGCTGAACGTGTACGACACCGGCCGGACCGGCCGGATCCGGGTGCTGAGCTTCAAGACCGGCATC
ATCAGCCTGTGCAAGGCCCACCTGGAGGACAAGTACCGGTACCTGTTCAAGCAGGTGGCCAGCAGCACCGGCTTC
TGCGACCAGCGGCGGCTGGGCCTGCTGCTGCACGACAGCATCCAGATCCCCCGGCAGCTGGGCGAGGTGGCCAGC
TTCGGCGGCAGCAACATCGAGCCCAGCGTGCGGAGCTGCTTCCAGTTCGCCAACAACAAGCCCGAGATCGAGGCC
GCCCTGTTCCTGGACTGGATGCGGCTGGAGCCCCAGAGCATGGTGTGGCTGCCCGTGCTGCACCGGGTGGCCGCC
GCCGAGACCGCCAAGCACCAGGCCAAGTGCAACATCTGCAAGGAGTGCCCCATCATCGGCTTCCGGTACCGGAGC
CTGAAGCACTTCAACTACGACATCTGCCAGAGCTGCTTCTTCAGCGGCCGGGTGGCCAAGGGCCACAAGATGCAC
TACCCCATGGTGGAGTACTGCACCCCCACCACCAGCGGCGAGGACGTGCGGGACTTCGCCAAGGTGCTGAAGAAC
AAGTTCCGGACCAAGCGGTACTTCGCCAAGCACCCCCGGATGGGCTACCTGCCCGTGCAGACCGTGCTGGAGGGC
GACAACATGGAGACCCCCGTGACCCTGATCAACTTCTGGCCCGTGGACAGCGCCCCCGCCAGCAGCCCCCAGCTG
AGCCACGACGACACCCACAGCCGGATCGAGCACTACGCCAGCCGGCTGGCCGAGATGGAGAACAGCAACGGCAGC
TACCTGAACGACAGCATCAGCCCCAACGAGAGCATCGACGACGAGCACCTGCTGATCCAGCACTACTGCCAGAGC
CTGAACCAGGACAGCCCCCTGAGCCAGCCCCGGAGC
Nterm-R2_R16-R17_H4 to 1st coiled coil and proline rich region that follows:
(SEQ ID NO: 33)
ATGCTGTGGTGGGAGGAGGTGGAGGACTGCTACGAGCGGGAGGACGTGCAGAAGAAGACCTTCACCAAGTGGGTG
AACGCCCAGTTCAGCAAGTTCGGCAAGCAGCACATCGAGAACCTGTTCAGCGACCTGCAGGACGGCCGGCGGCTG
CTGGACCTGCTGGAGGGCCTGACCGGCCAGAAGCTGCCCAAGGAGAAGGGCAGCACCCGGGTGCACGCCCTGAAC
AACGTGAACAAGGCCCTGCGGGTGCTGCAGAACAACAACGTGGACCTGGTGAACATCGGCAGCACCGACATCGTG
GACGGCAACCACAAGCTGACCCTGGGCCTGATCTGGAACATCATCCTGCACTGGCAGGTGAAGAACGTGATGAAG
AACATCATGGCCGGCCTGCAGCAGACCAACAGCGAGAAGATCCTGCTGAGCTGGGTGCGGCAGAGCACCCGGAAC
TACCCCCAGGTGAACGTGATCAACTTCACCACCAGCTGGAGCGACGGCCTGGCCCTGAACGCCCTGATCCACAGC
CACCGGCCCGACCTGTTCGACTGGAACAGCGTGGTGTGCCAGCAGAGCGCCACCCAGCGGCTGGAGCACGCCTTC
AACATCGCCCGGTACCAGCTGGGCATCGAGAAGCTGCTGGACCCCGAGGACGTGGACACCACCTACCCCGACAAG
AAGAGCATCCTGATGTACATCACCAGCCTGTTCCAGGTGCTGCCCCAGCAGGTGAGCATCGAGGCCATCCAGGAG
GTGGAGATGCTGCCCCGGCCCCCCAAGGTGACCAAGGAGGAGCACTTCCAGCTGCACCACCAGATGCACTACAGC
CAGCAGATCACCGTGAGCCTGGCCCAGGGCTACGAGCGGACCAGCAGCCCCAAGCCCCGGTTCAAGAGCTACGCC
TACACCCAGGCCGCCTACGTGACCACCAGCGACCCCACCCGGAGCCCCTTCCCCAGCCAGCACCTGGAGGCCCCC
GAGGACAAGAGCTTCGGCAGCAGCCTGATGGAGAGCGAGGTGAACCTGGACCGGTACCAGACCGCCCTGGAGGAG
GTGCTGAGCTGGCTGCTGAGCGCCGAGGACACCCTGCAGGCCCAGGGCGAGATCAGCAACGACGTGGAGGTGGTG
AAGGACCAGTTCCACACCCACGAGGGCTACATGATGGACCTGACCGCCCACCAGGGCCGGGTGGGCAACATCCTG
CAGCTGGGCAGCAAGCTGATCGGCACCGGCAAGCTGAGCGAGGACGAGGAGACCGAGGTGCAGGAGCAGATGAAC
CTGCTGAACAGCCGGTGGGAGTGCCTGCGGGTGGCCAGCATGGAGAAGCAGAGCAACCTGCACCGGGTGCTGATG
GACCTGCAGAACCAGAAGCTGAAGGAGCTGAACGACTGGCTGACCAAGACCGAGGAGCGGACCCGGAAGATGGAG
GAGGAGCCCCTGGGCCCCGACCTGGAGGACCTGAAGCGGCAGGTGCAGCAGCACAAGGTGCTGCAGGAGGACCTG
GAGCAGGAGCAGGTGCGGGTGAACAGCCTGACCCACATGGTGGTGGTGGTGGACGAGAGCAGCGGCGACCACGCC
ACCGCCGCCCTGGAGGAGCAGCTGAAGGTGCTGGGCGACCGGTGGGCCAACATCTGCCGGTGGACCGAGGACCGG
TGGGTGCTGCTGCAGGACCACACCGTGCGGGAGGAGACCATGATGGTGATGACCGAGGACATGCCCCTGGAGATC
AGCTACGTGCCCAGCACCTACCTGACCGAGATCACCCACGTGAGCCAGGCCCTGCTGGAGGTGGAGCAGCTGCTG
AACGCCCCCGACCTGTGCGCCAAGGACTTCGAGGACCTGTTCAAGCAGGAGGAGAGCCTGAAGAACATCAAGGAC
AGCCTGCAGCAGAGCAGCGGCCGGATCGACATCATCCACAGCAAGAAGACCGCCGCCCTGCAGAGCGCCACCCCC
GTGGAGCGGGTGAAGCTGCAGGAGGCCCTGAGCCAGCTGGACTTCCAGTGGGAGAAGGTGAACAAGATGTACAAG
GACCGGCAGGGCCGGTTCGACCGGAGCGTGGAGAAGTGGCGGCGGTTCCACTACGACATCAAGATCTTCAACCAG
TGGCTGACCGAGGCCGAGCAGTTCCTGCGGAAGACCCAGATCCCCGAGAACTGGGAGCACGCCAAGTACAAGTGG
TACCTGAAGGAGCTGCAGGACGGCATCGGCCAGCGGCAGACCGTGGTGCGGACCCTGAACGCCACCGGCGAGGAG
ATCATCCAGCAGAGCAGCAAGACCGACGCCAGCATCCTGCAGGAGAAGCTGGGCAGCCTGAACCTGCGGTGGCAG
GAGGTGTGCAAGCAGCTGAGCGACCGGAAGAAGCGGCTGGAGGAGCAGAAGGGCCCCGCCAGCCAGCACTTCCTG
AGCACCAGCGTGCAGGGCCCCTGGGAGCGGGCCATCAGCCCCAACAAGGTGCCCTACTACATCAACCACGAGACC
CAGACCACCTGCTGGGACCACCCCAAGATGACCGAGCTGTACCAGAGCCTGGCCGACCTGAACAACGTGCGGTTC
AGCGCCTACCGGACCGCCATGAAGCTGCGGCGGCTGCAGAAGGCCCTGTGCCTGGACCTGCTGAGCCTGAGCGCC
GCCTGCGACGCCCTGGACCAGCACAACCTGAAGCAGAACGACCAGCCCATGGACATCCTGCAGATCATCAACTGC
CTGACCACCATCTACGACCGGCTGGAGCAGGAGCACAACAACCTGGTGAACGTGCCCCTGTGCGTGGACATGTGC
CTGAACTGGCTGCTGAACGTGTACGACACCGGCCGGACCGGCCGGATCCGGGTGCTGAGCTTCAAGACCGGCATC
ATCAGCCTGTGCAAGGCCCACCTGGAGGACAAGTACCGGTACCTGTTCAAGCAGGTGGCCAGCAGCACCGGCTTC
TGCGACCAGCGGCGGCTGGGCCTGCTGCTGCACGACAGCATCCAGATCCCCCGGCAGCTGGGCGAGGTGGCCAGC
TTCGGCGGCAGCAACATCGAGCCCAGCGTGCGGAGCTGCTTCCAGTTCGCCAACAACAAGCCCGAGATCGAGGCC
GCCCTGTTCCTGGACTGGATGCGGCTGGAGCCCCAGAGCATGGTGTGGCTGCCCGTGCTGCACCGGGTGGCCGCC
GCCGAGACCGCCAAGCACCAGGCCAAGTGCAACATCTGCAAGGAGTGCCCCATCATCGGCTTCCGGTACCGGAGC
CTGAAGCACTTCAACTACGACATCTGCCAGAGCTGCTTCTTCAGCGGCCGGGTGGCCAAGGGCCACAAGATGCAC
TACCCCATGGTGGAGTACTGCACCCCCACCACCAGCGGCGAGGACGTGCGGGACTTCGCCAAGGTGCTGAAGAAC
AAGTTCCGGACCAAGCGGTACTTCGCCAAGCACCCCCGGATGGGCTACCTGCCCGTGCAGACCGTGCTGGAGGGC
GACAACATGGAGACCCCCGTGACCCTGATCAACTTCTGGCCCGTGGACAGCGCCCCCGCCAGCAGCCCCCAGCTG
AGCCACGACGACACCCACAGCCGGATCGAGCACTACGCCAGCCGGCTGGCCGAGATGGAGAACAGCAACGGCAGC
TACCTGAACGACAGCATCAGCCCCAACGAGAGCATCGACGACGAGCACCTGCTGATCCAGCACTACTGCCAGAGC
CTGAACCAGGACAGCCCCCTGAGCCAGCCCCGGAGCCCCGCCCAGATCCTGATCAGCCTGGAGAGCGAGGAGCGG
GGCGAGCTGGAGCGGATCCTGGCCGACCTGGAGGAGGAGAACCGGAACCTGCAGGCCGAGTACGACCGGCTGAAG
CAGCAGCACGAGCACAAGGGCCTGAGCCCCCTGCCCAGCCCCCCCGAGATGATGCCCACCAGCCCCCAGAGCCCC
Nterm-R2_R16-R17_R24 to 1st coiled coil and proline rich region that follows:
(SEQ ID NO: 34)
ATGCTGTGGTGGGAGGAGGTGGAGGACTGCTACGAGCGGGAGGACGTGCAGAAGAAGACCTTCACCAAGTGGGTG
AACGCCCAGTTCAGCAAGTTCGGCAAGCAGCACATCGAGAACCTGTTCAGCGACCTGCAGGACGGCCGGCGGCTG
CTGGACCTGCTGGAGGGCCTGACCGGCCAGAAGCTGCCCAAGGAGAAGGGCAGCACCCGGGTGCACGCCCTGAAC
AACGTGAACAAGGCCCTGCGGGTGCTGCAGAACAACAACGTGGACCTGGTGAACATCGGCAGCACCGACATCGTG
GACGGCAACCACAAGCTGACCCTGGGCCTGATCTGGAACATCATCCTGCACTGGCAGGTGAAGAACGTGATGAAG
AACATCATGGCCGGCCTGCAGCAGACCAACAGCGAGAAGATCCTGCTGAGCTGGGTGCGGCAGAGCACCCGGAAC
TACCCCCAGGTGAACGTGATCAACTTCACCACCAGCTGGAGCGACGGCCTGGCCCTGAACGCCCTGATCCACAGC
CACCGGCCCGACCTGTTCGACTGGAACAGCGTGGTGTGCCAGCAGAGCGCCACCCAGCGGCTGGAGCACGCCTTC
AACATCGCCCGGTACCAGCTGGGCATCGAGAAGCTGCTGGACCCCGAGGACGTGGACACCACCTACCCCGACAAG
AAGAGCATCCTGATGTACATCACCAGCCTGTTCCAGGTGCTGCCCCAGCAGGTGAGCATCGAGGCCATCCAGGAG
GTGGAGATGCTGCCCCGGCCCCCCAAGGTGACCAAGGAGGAGCACTTCCAGCTGCACCACCAGATGCACTACAGC
CAGCAGATCACCGTGAGCCTGGCCCAGGGCTACGAGCGGACCAGCAGCCCCAAGCCCCGGTTCAAGAGCTACGCC
TACACCCAGGCCGCCTACGTGACCACCAGCGACCCCACCCGGAGCCCCTTCCCCAGCCAGCACCTGGAGGCCCCC
GAGGACAAGAGCTTCGGCAGCAGCCTGATGGAGAGCGAGGTGAACCTGGACCGGTACCAGACCGCCCTGGAGGAG
GTGCTGAGCTGGCTGCTGAGCGCCGAGGACACCCTGCAGGCCCAGGGCGAGATCAGCAACGACGTGGAGGTGGTG
AAGGACCAGTTCCACACCCACGAGGGCTACATGATGGACCTGACCGCCCACCAGGGCCGGGTGGGCAACATCCTG
CAGCTGGGCAGCAAGCTGATCGGCACCGGCAAGCTGAGCGAGGACGAGGAGACCGAGGTGCAGGAGCAGATGAAC
CTGCTGAACAGCCGGTGGGAGTGCCTGCGGGTGGCCAGCATGGAGAAGCAGAGCAACCTGCACCGGGTGCTGATG
GACCTGCAGAACCAGAAGCTGAAGGAGCTGAACGACTGGCTGACCAAGACCGAGGAGCGGACCCGGAAGATGGAG
GAGGAGCCCCTGGGCCCCGACCTGGAGGACCTGAAGCGGCAGGTGCAGCAGCACAAGGTGCTGCAGGAGGACCTG
GAGCAGGAGCAGGTGCGGGTGAACAGCCTGACCCACATGGTGGTGGTGGTGGACGAGAGCAGCGGCGACCACGCC
ACCGCCGCCCTGGAGGAGCAGCTGAAGGTGCTGGGCGACCGGTGGGCCAACATCTGCCGGTGGACCGAGGACCGG
TGGGTGCTGCTGCAGGACCACACCGTGCGGGAGGAGACCATGATGGTGATGACCGAGGACATGCCCCTGGAGATC
AGCTACGTGCCCAGCACCTACCTGACCGAGATCACCCACGTGAGCCAGGCCCTGCTGGAGGTGGAGCAGCTGCTG
AACGCCCCCGACCTGTGCGCCAAGGACTTCGAGGACCTGTTCAAGCAGGAGGAGAGCCTGAAGAACATCAAGGAC
AGCCTGCAGCAGAGCAGCGGCCGGATCGACATCATCCACAGCAAGAAGACCGCCGCCCTGCAGAGCGCCACCCCC
GTGGAGCGGGTGAAGCTGCAGGAGGCCCTGAGCCAGCTGGACTTCCAGTGGGAGAAGGTGAACAAGATGTACAAG
GACCGGCAGGGCCGGTTCGACCGGAGCGTGGAGAAGTGGCGGCGGTTCCACTACGACATCAAGATCTTCAACCAG
TGGCTGACCGAGGCCGAGCAGTTCCTGCGGAAGACCCAGATCCCCGAGAACTGGGAGCACGCCAAGTACAAGTGG
TACCTGAAGGAGCTGCAGGACGGCATCGGCCAGCGGCAGACCGTGGTGCGGACCCTGAACGCCACCGGCGAGGAG
ATCATCCAGCAGAGCAGCAAGACCGACGCCAGCATCCTGCAGGAGAAGCTGGGCAGCCTGAACCTGCGGTGGCAG
GAGGTGTGCAAGCAGCTGAGCGACCGGAAGAAGCGGCTGGAGGAGCAGAAGTGGCAGCGGAAGATCGACGAGACC
CTGGAGCGGCTGCAGGAGCTGCAGGAGGCCACCGACGAGCTGGACCTGAAGCTGCGGCAGGCCGAGGTGATCAAG
GGCAGCTGGCAGCCCGTGGGCGACCTGCTGATCGACAGCCTGCAGGACCACCTGGAGAAGGTGAAGGCCCTGCGG
GGCGAGATCGCCCCCCTGAAGGAGAACGTGAGCCACGTGAACGACCTGGCCCGGCAGCTGACCACCCTGGGCATC
CAGCTGAGCCCCTACAACCTGAGCACCCTGGAGGACCTGAACACCCGGTGGAAGCTGCTGCAGGTGGCCGTGGAG
GACCGGGTGCGGCAGCTGCACGAGGCCCACCGGGACTTCGGCCCCGCCAGCCAGCACTTCCTGAGCACCAGCGTG
CAGGGCCCCTGGGAGCGGGCCATCAGCCCCAACAAGGTGCCCTACTACATCAACCACGAGACCCAGACCACCTGC
TGGGACCACCCCAAGATGACCGAGCTGTACCAGAGCCTGGCCGACCTGAACAACGTGCGGTTCAGCGCCTACCGG
ACCGCCATGAAGCTGCGGCGGCTGCAGAAGGCCCTGTGCCTGGACCTGCTGAGCCTGAGCGCCGCCTGCGACGCC
CTGGACCAGCACAACCTGAAGCAGAACGACCAGCCCATGGACATCCTGCAGATCATCAACTGCCTGACCACCATC
TACGACCGGCTGGAGCAGGAGCACAACAACCTGGTGAACGTGCCCCTGTGCGTGGACATGTGCCTGAACTGGCTG
CTGAACGTGTACGACACCGGCCGGACCGGCCGGATCCGGGTGCTGAGCTTCAAGACCGGCATCATCAGCCTGTGC
AAGGCCCACCTGGAGGACAAGTACCGGTACCTGTTCAAGCAGGTGGCCAGCAGCACCGGCTTCTGCGACCAGCGG
CGGCTGGGCCTGCTGCTGCACGACAGCATCCAGATCCCCCGGCAGCTGGGCGAGGTGGCCAGCTTCGGCGGCAGC
AACATCGAGCCCAGCGTGCGGAGCTGCTTCCAGTTCGCCAACAACAAGCCCGAGATCGAGGCCGCCCTGTTCCTG
GACTGGATGCGGCTGGAGCCCCAGAGCATGGTGTGGCTGCCCGTGCTGCACCGGGTGGCCGCCGCCGAGACCGCC
AAGCACCAGGCCAAGTGCAACATCTGCAAGGAGTGCCCCATCATCGGCTTCCGGTACCGGAGCCTGAAGCACTTC
AACTACGACATCTGCCAGAGCTGCTTCTTCAGCGGCCGGGTGGCCAAGGGCCACAAGATGCACTACCCCATGGTG
GAGTACTGCACCCCCACCACCAGCGGCGAGGACGTGCGGGACTTCGCCAAGGTGCTGAAGAACAAGTTCCGGACC
AAGCGGTACTTCGCCAAGCACCCCCGGATGGGCTACCTGCCCGTGCAGACCGTGCTGGAGGGCGACAACATGGAG
ACCCCCGTGACCCTGATCAACTTCTGGCCCGTGGACAGCGCCCCCGCCAGCAGCCCCCAGCTGAGCCACGACGAC
ACCCACAGCCGGATCGAGCACTACGCCAGCCGGCTGGCCGAGATGGAGAACAGCAACGGCAGCTACCTGAACGAC
AGCATCAGCCCCAACGAGAGCATCGACGACGAGCACCTGCTGATCCAGCACTACTGCCAGAGCCTGAACCAGGAC
AGCCCCCTGAGCCAGCCCCGGAGCCCCGCCCAGATCCTGATCAGCCTGGAGAGCGAGGAGCGGGGCGAGCTGGAG
CGGATCCTGGCCGACCTGGAGGAGGAGAACCGGAACCTGCAGGCCGAGTACGACCGGCTGAAGCAGCAGCACGAG
CACAAGGGCCTGAGCCCCCTGCCCAGCCCCCCCGAGATGATGCCCACCAGCCCCCAGAGCCCC
Nterm-R2_R23_R24 to end of dystrophin:
(SEQ ID NO: 35)
ATGCTGTGGTGGGAGGAGGTGGAGGACTGCTACGAGCGGGAGGACGTGCAGAAGAAGACCTTCACCAAGTGGGTG
AACGCCCAGTTCAGCAAGTTCGGCAAGCAGCACATCGAGAACCTGTTCAGCGACCTGCAGGACGGCCGGCGGCTG
CTGGACCTGCTGGAGGGCCTGACCGGCCAGAAGCTGCCCAAGGAGAAGGGCAGCACCCGGGTGCACGCCCTGAAC
AACGTGAACAAGGCCCTGCGGGTGCTGCAGAACAACAACGTGGACCTGGTGAACATCGGCAGCACCGACATCGTG
GACGGCAACCACAAGCTGACCCTGGGCCTGATCTGGAACATCATCCTGCACTGGCAGGTGAAGAACGTGATGAAG
AACATCATGGCCGGCCTGCAGCAGACCAACAGCGAGAAGATCCTGCTGAGCTGGGTGCGGCAGAGCACCCGGAAC
TACCCCCAGGTGAACGTGATCAACTTCACCACCAGCTGGAGCGACGGCCTGGCCCTGAACGCCCTGATCCACAGC
CACCGGCCCGACCTGTTCGACTGGAACAGCGTGGTGTGCCAGCAGAGCGCCACCCAGCGGCTGGAGCACGCCTTC
AACATCGCCCGGTACCAGCTGGGCATCGAGAAGCTGCTGGACCCCGAGGACGTGGACACCACCTACCCCGACAAG
AAGAGCATCCTGATGTACATCACCAGCCTGTTCCAGGTGCTGCCCCAGCAGGTGAGCATCGAGGCCATCCAGGAG
GTGGAGATGCTGCCCCGGCCCCCCAAGGTGACCAAGGAGGAGCACTTCCAGCTGCACCACCAGATGCACTACAGC
CAGCAGATCACCGTGAGCCTGGCCCAGGGCTACGAGCGGACCAGCAGCCCCAAGCCCCGGTTCAAGAGCTACGCC
TACACCCAGGCCGCCTACGTGACCACCAGCGACCCCACCCGGAGCCCCTTCCCCAGCCAGCACCTGGAGGCCCCC
GAGGACAAGAGCTTCGGCAGCAGCCTGATGGAGAGCGAGGTGAACCTGGACCGGTACCAGACCGCCCTGGAGGAG
GTGCTGAGCTGGCTGCTGAGCGCCGAGGACACCCTGCAGGCCCAGGGCGAGATCAGCAACGACGTGGAGGTGGTG
AAGGACCAGTTCCACACCCACGAGGGCTACATGATGGACCTGACCGCCCACCAGGGCCGGGTGGGCAACATCCTG
CAGCTGGGCAGCAAGCTGATCGGCACCGGCAAGCTGAGCGAGGACGAGGAGACCGAGGTGCAGGAGCAGATGAAC
CTGCTGAACAGCCGGTGGGAGTGCCTGCGGGTGGCCAGCATGGAGAAGCAGAGCAACCTGCACCGGGTGCTGATG
GACCTGCAGAACCAGAAGCTGAAGGAGCTGAACGACTGGCTGACCAAGACCGAGGAGCGGACCCGGAAGATGGAG
GAGGAGCCCCTGGGCCCCGACCTGGAGGACCTGAAGCGGCAGGTGCAGCAGCACAAGGTGCTGCAGGAGGACCTG
GAGCAGGAGCAGGTGCGGGTGAACAGCCTGACCCACATGGTGGTGGTGGTGGACGAGAGCAGCGGCGACCACGCC
ACCGCCGCCCTGGAGGAGCAGCTGAAGGTGCTGGGCGACCGGTGGGCCAACATCTGCCGGTGGACCGAGGACCGG
TGGGTGCTGCTGCAGGACCACCTGAGCCTGCAGGAGCTGCTGGTGTGGCTGCAGCTGAAGGACGACGAGCTGAGC
CGGCAGGCCCCCATCGGCGGCGACTTCCCCGCCGTGCAGAAGCAGAACGACGTGCACCGGGCCTTCAAGCGGGAG
CTGAAGACCAAGGAGCCCGTGATCATGAGCACCCTGGAGACCGTGCGGATCTTCCTGACCGAGCAGCCCCTGGAG
GGCCTGGAGAAGCTGTACCAGGAGCCCCGGGAGCTGCCCCCCGAGGAGCGGGCCCAGAACGTGACCCGGCTGCTG
CGGAAGCAGGCCGAGGAGGTGAACACCGAGTGGGAGAAGCTGAACCTGCACAGCGCCGACTGGCAGCGGAAGATC
GACGAGACCCTGGAGCGGCTGCAGGAGCTGCAGGAGGCCACCGACGAGCTGGACCTGAAGCTGCGGCAGGCCGAG
GTGATCAAGGGCAGCTGGCAGCCCGTGGGCGACCTGCTGATCGACAGCCTGCAGGACCACCTGGAGAAGGTGAAG
GCCCTGCGGGGCGAGATCGCCCCCCTGAAGGAGAACGTGAGCCACGTGAACGACCTGGCCCGGCAGCTGACCACC
CTGGGCATCCAGCTGAGCCCCTACAACCTGAGCACCCTGGAGGACCTGAACACCCGGTGGAAGCTGCTGCAGGTG
GCCGTGGAGGACCGGGTGCGGCAGCTGCACGAGGCCCACCGGGACTTCGGCCCCGCCAGCCAGCACTTCCTGAGC
ACCAGCGTGCAGGGCCCCTGGGAGCGGGCCATCAGCCCCAACAAGGTGCCCTACTACATCAACCACGAGACCCAG
ACCACCTGCTGGGACCACCCCAAGATGACCGAGCTGTACCAGAGCCTGGCCGACCTGAACAACGTGCGGTTCAGC
GCCTACCGGACCGCCATGAAGCTGCGGCGGCTGCAGAAGGCCCTGTGCCTGGACCTGCTGAGCCTGAGCGCCGCC
TGCGACGCCCTGGACCAGCACAACCTGAAGCAGAACGACCAGCCCATGGACATCCTGCAGATCATCAACTGCCTG
ACCACCATCTACGACCGGCTGGAGCAGGAGCACAACAACCTGGTGAACGTGCCCCTGTGCGTGGACATGTGCCTG
AACTGGCTGCTGAACGTGTACGACACCGGCCGGACCGGCCGGATCCGGGTGCTGAGCTTCAAGACCGGCATCATC
AGCCTGTGCAAGGCCCACCTGGAGGACAAGTACCGGTACCTGTTCAAGCAGGTGGCCAGCAGCACCGGCTTCTGC
GACCAGCGGCGGCTGGGCCTGCTGCTGCACGACAGCATCCAGATCCCCCGGCAGCTGGGCGAGGTGGCCAGCTTC
GGCGGCAGCAACATCGAGCCCAGCGTGCGGAGCTGCTTCCAGTTCGCCAACAACAAGCCCGAGATCGAGGCCGCC
CTGTTCCTGGACTGGATGCGGCTGGAGCCCCAGAGCATGGTGTGGCTGCCCGTGCTGCACCGGGTGGCCGCCGCC
GAGACCGCCAAGCACCAGGCCAAGTGCAACATCTGCAAGGAGTGCCCCATCATCGGCTTCCGGTACCGGAGCCTG
AAGCACTTCAACTACGACATCTGCCAGAGCTGCTTCTTCAGCGGCCGGGTGGCCAAGGGCCACAAGATGCACTAC
CCCATGGTGGAGTACTGCACCCCCACCACCAGCGGCGAGGACGTGCGGGACTTCGCCAAGGTGCTGAAGAACAAG
TTCCGGACCAAGCGGTACTTCGCCAAGCACCCCCGGATGGGCTACCTGCCCGTGCAGACCGTGCTGGAGGGCGAC
AACATGGAGACCCCC
GTGACCCTGATCAACTTCTGGCCCGTGGACAGCGCCCCCGCCAGCAGCCCCCAGCTGAGCCACGACGACACCCAC
AGCCGGATCGAGCACTACGCCAGCCGGCTGGCCGAGATGGAGAACAGCAACGGCAGCTACCTGAACGACAGCATC
AGCCCCAACGAGAGCATCGACGACGAGCACCTGCTGATCCAGCACTACTGCCAGAGCCTGAACCAGGACAGCCCC
CTGAGCCAGCCCCGGAGCCCCGCCCAGATCCTGATCAGCCTGGAGAGCGAGGAGCGGGGCGAGCTGGAGCGGATC
CTGGCCGACCTGGAGGAGGAGAACCGGAACCTGCAGGCCGAGTACGACCGGCTGAAGCAGCAGCACGAGCACAAG
GGCCTGAGCCCCCTGCCCAGCCCCCCCGAGATGATGCCCACCAGCCCCCAGAGCCCCCGGGACGCCGAGCTGATC
GCCGAGGCCAAGCTGCTGCGGCAGCACAAGGGCCGGCTGGAGGCCCGGATGCAGATCCTGGAGGACCACAACAAG
CAGCTGGAGAGCCAGCTGCACCGGCTGCGGCAGCTGCTGGAGCAGCCCCAGGCCGAGGCCAAGGTGAACGGCACC
ACCGTGAGCAGCCCCAGCACCAGCCTGCAGCGGAGCGACAGCAGCCAGCCCATGCTGCTGCGGGTGGTGGGCAGC
CAGACCAGCGACAGCATGGGCGAGGAGGACCTGCTGAGCCCCCCCCAGGACACCAGCACCGGCCTGGAGGAGGTG
ATGGAGCAGCTGAACAACAGCTTCCCCAGCAGCCGGGGCCGGAACACCCCCGGCAAGCCCATGCGGGAGGACACC
ATG
Nterm-R2_R23_R24 to end of dystrophin:
(SEQ ID NO: 134)
ATGCTGTGGTGGGAGGAGGTGGAGGACTGCTACGAGCGGGAGGACGTGCAGAAGAAGACCTTCACCAAGTGGGTG
AACGCCCAGTTCAGCAAGTTCGGCAAGCAGCACATCGAGAACCTGTTCAGCGACCTGCAGGACGGCCGGCGGCTG
CTGGACCTGCTGGAGGGCCTGACCGGCCAGAAGCTGCCCAAGGAGAAGGGCAGCACCCGGGTGCACGCCCTGAAC
AACGTGAACAAGGCCCTGCGGGTGCTGCAGAACAACAACGTGGACCTGGTGAACATCGGCAGCACCGACATCGTG
GACGGCAACCACAAGCTGACCCTGGGCCTGATCTGGAACATCATCCTGCACTGGCAGGTGAAGAACGTGATGAAG
AACATCATGGCCGGCCTGCAGCAGACCAACAGCGAGAAGATCCTGCTGAGCTGGGTGCGGCAGAGCACCCGGAAC
TACCCCCAGGTGAACGTGATCAACTTCACCACCAGCTGGAGCGACGGCCTGGCCCTGAACGCCCTGATCCACAGC
CACCGGCCCGACCTGTTCGACTGGAACAGCGTGGTGTGCCAGCAGAGCGCCACCCAGCGGCTGGAGCACGCCTTC
AACATCGCCCGGTACCAGCTGGGCATCGAGAAGCTGCTGGACCCCGAGGACGTGGACACCACCTACCCCGACAAG
AAGAGCATCCTGATGTACATCACCAGCCTGTTCCAGGTGCTGCCCCAGCAGGTGAGCATCGAGGCCATCCAGGAG
GTGGAGATGCTGCCCCGGCCCCCCAAGGTGACCAAGGAGGAGCACTTCCAGCTGCACCACCAGATGCACTACAGC
CAGCAGATCACCGTGAGCCTGGCCCAGGGCTACGAGCGGACCAGCAGCCCCAAGCCCCGGTTCAAGAGCTACGCC
TACACCCAGGCCGCCTACGTGACCACCAGCGACCCCACCCGGAGCCCCTTCCCCAGCCAGCACCTGGAGGCCCCC
GAGGACAAGAGCTTCGGCAGCAGCCTGATGGAGAGCGAGGTGAACCTGGACCGGTACCAGACCGCCCTGGAGGAG
GTGCTGAGCTGGCTGCTGAGCGCCGAGGACACCCTGCAGGCCCAGGGCGAGATCAGCAACGACGTGGAGGTGGTG
AAGGACCAGTTCCACACCCACGAGGGCTACATGATGGACCTGACCGCCCACCAGGGCCGGGTGGGCAACATCCTG
CAGCTGGGCAGCAAGCTGATCGGCACCGGCAAGCTGAGCGAGGACGAGGAGACCGAGGTGCAGGAGCAGATGAAC
CTGCTGAACAGCCGGTGGGAGTGCCTGCGGGTGGCCAGCATGGAGAAGCAGAGCAACCTGCACCGGGTGCTGATG
GACCTGCAGAACCAGAAGCTGAAGGAGCTGAACGACTGGCTGACCAAGACCGAGGAGCGGACCCGGAAGATGGAG
GAGGAGCCCCTGGGCCCCGACCTGGAGGACCTGAAGCGGCAGGTGCAGCAGCACAAGGTGCTGCAGGAGGACCTG
GAGCAGGAGCAGGTGCGGGTGAACAGCCTGACCCACATGGTGGTGGTGGTGGACGAGAGCAGCGGCGACCACGCC
ACCGCCGCCCTGGAGGAGCAGCTGAAGGTGCTGGGCGACCGGTGGGCCAACATCTGCCGGTGGACCGAGGACCGG
TGGGTGCTGCTGCAGGACGCCAGCAGCGACCAGTGGAAGCGGCTGCACCTGAGCCTGCAGGAGCTGCTGGTGTGG
CTGCAGCTGAAGGACGACGAGCTGAGCCGGCAGGCCCCCATCGGCGGCGACTTCCCCGCCGTGCAGAAGCAGAAC
GACGTGCACCGGGCCTTCAAGCGGGAGCTGAAGACCAAGGAGCCCGTGATCATGAGCACCCTGGAGACCGTGCGG
ATCTTCCTGACCGAGCAGCCCCTGGAGGGCCTGGAGAAGCTGTACCAGGAGCCCCGGGAGCTGCCCCCCGAGGAG
CGGGCCCAGAACGTGACCCGGCTGCTGCGGAAGCAGGCCGAGGAGGTGAACACCGAGTGGGAGAAGCTGAACCTG
CACAGCGCCGACTGGCAGCGGAAGATCGACGAGACCCTGGAGCGGCTGCAGGAGCTGCAGGAGGCCACCGACGAG
CTGGACCTGAAGCTGCGGCAGGCCGAGGTGATCAAGGGCAGCTGGCAGCCCGTGGGCGACCTGCTGATCGACAGC
CTGCAGGACCACCTGGAGAAGGTGAAGGCCCTGCGGGGCGAGATCGCCCCCCTGAAGGAGAACGTGAGCCACGTG
AACGACCTGGCCCGGCAGCTGACCACCCTGGGCATCCAGCTGAGCCCCTACAACCTGAGCACCCTGGAGGACCTG
AACACCCGGTGGAAGCTGCTGCAGGTGGCCGTGGAGGACCGGGTGCGGCAGCTGCACGAGGCCCACCGGGACTTC
GGCCCCGCCAGCCAGCACTTCCTGAGCACCAGCGTGCAGGGCCCCTGGGAGCGGGCCATCAGCCCCAACAAGGTG
CCCTACTACATCAACCACGAGACCCAGACCACCTGCTGGGACCACCCCAAGATGACCGAGCTGTACCAGAGCCTG
GCCGACCTGAACAACGTGCGGTTCAGCGCCTACCGGACCGCCATGAAGCTGCGGCGGCTGCAGAAGGCCCTGTGC
CTGGACCTGCTGAGCCTGAGCGCCGCCTGCGACGCCCTGGACCAGCACAACCTGAAGCAGAACGACCAGCCCATG
GACATCCTGCAGATCATCAACTGCCTGACCACCATCTACGACCGGCTGGAGCAGGAGCACAACAACCTGGTGAAC
GTGCCCCTGTGCGTGGACATGTGCCTGAACTGGCTGCTGAACGTGTACGACACCGGCCGGACCGGCCGGATCCGG
GTGCTGAGCTTCAAGACCGGCATCATCAGCCTGTGCAAGGCCCACCTGGAGGACAAGTACCGGTACCTGTTCAAG
CAGGTGGCCAGCAGCACCGGCTTCTGCGACCAGCGGCGGCTGGGCCTGCTGCTGCACGACAGCATCCAGATCCCC
CGGCAGCTGGGCGAGGTGGCCAGCTTCGGCGGCAGCAACATCGAGCCCAGCGTGCGGAGCTGCTTCCAGTTCGCC
AACAACAAGCCCGAGATCGAGGCCGCCCTGTTCCTGGACTGGATGCGGCTGGAGCCCCAGAGCATGGTGTGGCTG
CCCGTGCTGCACCGGGTGGCCGCCGCCGAGACCGCCAAGCACCAGGCCAAGTGCAACATCTGCAAGGAGTGCCCC
ATCATCGGCTTCCGGTACCGGAGCCTGAAGCACTTCAACTACGACATCTGCCAGAGCTGCTTCTTCAGCGGCCGG
GTGGCCAAGGGCCACAAGATGCACTACCCCATGGTGGAGTACTGCACCCCCACCACCAGCGGCGAGGACGTGCGG
GACTTCGCCAAGGTGCTGAAGAACAAGTTCCGGACCAAGCGGTACTTCGCCAAGCACCCCCGGATGGGCTACCTG
CCCGTGCAGACCGTGCTGGAGGGCGACAACATGGAGACCCCCGTGACCCTGATCAACTTCTGGCCCGTGGACAGC
GCCCCCGCCAGCAGCCCCCAGCTGAGCCACGACGACACCCACAGCCGGATCGAGCACTACGCCAGCCGGCTGGCC
GAGATGGAGAACAGCAACGGCAGCTACCTGAACGACAGCATCAGCCCCAACGAGAGCATCGACGACGAGCACCTG
CTGATCCAGCACTACTGCCAGAGCCTGAACCAGGACAGCCCCCTGAGCCAGCCCCGGAGCCCCGCCCAGATCCTG
ATCAGCCTGGAGAGCGAGGAGCGGGGCGAGCTGGAGCGGATCCTGGCCGACCTGGAGGAGGAGAACCGGAACCTG
CAGGCCGAGTACGACCGGCTGAAGCAGCAGCACGAGCACAAGGGCCTGAGCCCCCTGCCCAGCCCCCCCGAGATG
ATGCCCACCAGCCCCCAGAGCCCCCGGGACGCCGAGCTGATCGCCGAGGCCAAGCTGCTGCGGCAGCACAAGGGC
CGGCTGGAGGCCCGGATGCAGATCCTGGAGGACCACAACAAGCAGCTGGAGAGCCAGCTGCACCGGCTGCGGCAG
CTGCTGGAGCAGCCCCAGGCCGAGGCCAAGGTGAACGGCACCACCGTGAGCAGCCCCAGCACCAGCCTGCAGCGG
AGCGACAGCAGCCAGCCCATGCTGCTGCGGGTGGTGGGCAGCCAGACCAGCGACAGCATGGGCGAGGAGGACCTG
CTGAGCCCCCCCCAGGACACCAGCACCGGCCTGGAGGAGGTGATGGAGCAGCTGAACAACAGCTTCCCCAGCAGC
CGGGGCCGGAACACCCCCGGCAAGCCCATGCGGGAGGACACCATG
Nterm-R2_R16-R17_H4 to end:
(SEQ ID NO: 36)
ATGCTGTGGTGGGAGGAGGTGGAGGACTGCTACGAGCGGGAGGACGTGCAGAAGAAGACCTTCACCAAGTGGGTG
AACGCCCAGTTCAGCAAGTTCGGCAAGCAGCACATCGAGAACCTGTTCAGCGACCTGCAGGACGGCCGGCGGCTG
CTGGACCTGCTGGAGGGCCTGACCGGCCAGAAGCTGCCCAAGGAGAAGGGCAGCACCCGGGTGCACGCCCTGAAC
AACGTGAACAAGGCCCTGCGGGTGCTGCAGAACAACAACGTGGACCTGGTGAACATCGGCAGCACCGACATCGTG
GACGGCAACCACAAGCTGACCCTGGGCCTGATCTGGAACATCATCCTGCACTGGCAGGTGAAGAACGTGATGAAG
AACATCATGGCCGGCCTGCAGCAGACCAACAGCGAGAAGATCCTGCTGAGCTGGGTGCGGCAGAGCACCCGGAAC
TACCCCCAGGTGAACGTGATCAACTTCACCACCAGCTGGAGCGACGGCCTGGCCCTGAACGCCCTGATCCACAGC
CACCGGCCCGACCTGTTCGACTGGAACAGCGTGGTGTGCCAGCAGAGCGCCACCCAGCGGCTGGAGCACGCCTTC
AACATCGCCCGGTACCAGCTGGGCATCGAGAAGCTGCTGGACCCCGAGGACGTGGACACCACCTACCCCGACAAG
AAGAGCATCCTGATGTACATCACCAGCCTGTTCCAGGTGCTGCCCCAGCAGGTGAGCATCGAGGCCATCCAGGAG
GTGGAGATGCTGCCCCGGCCCCCCAAGGTGACCAAGGAGGAGCACTTCCAGCTGCACCACCAGATGCACTACAGC
CAGCAGATCACCGTGAGCCTGGCCCAGGGCTACGAGCGGACCAGCAGCCCCAAGCCCCGGTTCAAGAGCTACGCC
TACACCCAGGCCGCCTACGTGACCACCAGCGACCCCACCCGGAGCCCCTTCCCCAGCCAGCACCTGGAGGCCCCC
GAGGACAAGAGCTTCGGCAGCAGCCTGATGGAGAGCGAGGTGAACCTGGACCGGTACCAGACCGCCCTGGAGGAG
GTGCTGAGCTGGCTGCTGAGCGCCGAGGACACCCTGCAGGCCCAGGGCGAGATCAGCAACGACGTGGAGGTGGTG
AAGGACCAGTTCCACACCCACGAGGGCTACATGATGGACCTGACCGCCCACCAGGGCCGGGTGGGCAACATCCTG
CAGCTGGGCAGCAAGCTGATCGGCACCGGCAAGCTGAGCGAGGACGAGGAGACCGAGGTGCAGGAGCAGATGAAC
CTGCTGAACAGCCGGTGGGAGTGCCTGCGGGTGGCCAGCATGGAGAAGCAGAGCAACCTGCACCGGGTGCTGATG
GACCTGCAGAACCAGAAGCTGAAGGAGCTGAACGACTGGCTGACCAAGACCGAGGAGCGGACCCGGAAGATGGAG
GAGGAGCCCCTGGGCCCCGACCTGGAGGACCTGAAGCGGCAGGTGCAGCAGCACAAGGTGCTGCAGGAGGACCTG
GAGCAGGAGCAGGTGCGGGTGAACAGCCTGACCCACATGGTGGTGGTGGTGGACGAGAGCAGCGGCGACCACGCC
ACCGCCGCCCTGGAGGAGCAGCTGAAGGTGCTGGGCGACCGGTGGGCCAACATCTGCCGGTGGACCGAGGACCGG
TGGGTGCTGCTGCAGGACCACACCGTGCGGGAGGAGACCATGATGGTGATGACCGAGGACATGCCCCTGGAGATC
AGCTACGTGCCCAGCACCTACCTGACCGAGATCACCCACGTGAGCCAGGCCCTGCTGGAGGTGGAGCAGCTGCTG
AACGCCCCCGACCTGTGCGCCAAGGACTTCGAGGACCTGTTCAAGCAGGAGGAGAGCCTGAAGAACATCAAGGAC
AGCCTGCAGCAGAGCAGCGGCCGGATCGACATCATCCACAGCAAGAAGACCGCCGCCCTGCAGAGCGCCACCCCC
GTGGAGCGGGTGAAGCTGCAGGAGGCCCTGAGCCAGCTGGACTTCCAGTGGGAGAAGGTGAACAAGATGTACAAG
GACCGGCAGGGCCGGTTCGACCGGAGCGTGGAGAAGTGGCGGCGGTTCCACTACGACATCAAGATCTTCAACCAG
TGGCTGACCGAGGCCGAGCAGTTCCTGCGGAAGACCCAGATCCCCGAGAACTGGGAGCACGCCAAGTACAAGTGG
TACCTGAAGGAGCTGCAGGACGGCATCGGCCAGCGGCAGACCGTGGTGCGGACCCTGAACGCCACCGGCGAGGAG
ATCATCCAGCAGAGCAGCAAGACCGACGCCAGCATCCTGCAGGAGAAGCTGGGCAGCCTGAACCTGCGGTGGCAG
GAGGTGTGCAAGCAGCTGAGCGACCGGAAGAAGCGGCTGGAGGAGCAGAAGGGCCCCGCCAGCCAGCACTTCCTG
AGCACCAGCGTGCAGGGCCCCTGGGAGCGGGCCATCAGCCCCAACAAGGTGCCCTACTACATCAACCACGAGACC
CAGACCACCTGCTGGGACCACCCCAAGATGACCGAGCTGTACCAGAGCCTGGCCGACCTGAACAACGTGCGGTTC
AGCGCCTACCGGACCGCCATGAAGCTGCGGCGGCTGCAGAAGGCCCTGTGCCTGGACCTGCTGAGCCTGAGCGCC
GCCTGCGACGCCCTGGACCAGCACAACCTGAAGCAGAACGACCAGCCCATGGACATCCTGCAGATCATCAACTGC
CTGACCACCATCTACGACCGGCTGGAGCAGGAGCACAACAACCTGGTGAACGTGCCCCTGTGCGTGGACATGTGC
CTGAACTGGCTGCTGAACGTGTACGACACCGGCCGGACCGGCCGGATCCGGGTGCTGAGCTTCAAGACCGGCATC
ATCAGCCTGTGCAAGGCCCACCTGGAGGACAAGTACCGGTACCTGTTCAAGCAGGTGGCCAGCAGCACCGGCTTC
TGCGACCAGCGGCGGCTGGGCCTGCTGCTGCACGACAGCATCCAGATCCCCCGGCAGCTGGGCGAGGTGGCCAGC
TTCGGCGGCAGCAACATCGAGCCCAGCGTGCGGAGCTGCTTCCAGTTCGCCAACAACAAGCCCGAGATCGAGGCC
GCCCTGTTCCTGGACTGGATGCGGCTGGAGCCCCAGAGCATGGTGTGGCTGCCCGTGCTGCACCGGGTGGCCGCC
GCCGAGACCGCCAAGCACCAGGCCAAGTGCAACATCTGCAAGGAGTGCCCCATCATCGGCTTCCGGTACCGGAGC
CTGAAGCACTTCAACTACGACATCTGCCAGAGCTGCTTCTTCAGCGGCCGGGTGGCCAAGGGCCACAAGATGCAC
TACCCCATGGTGGAGTACTGCACCCCCACCACCAGCGGCGAGGACGTGCGGGACTTCGCCAAGGTGCTGAAGAAC
AAGTTCCGGACCAAGCGGTACTTCGCCAAGCACCCCCGGATGGGCTACCTGCCCGTGCAGACCGTGCTGGAGGGC
GACAACATGGAGACCCCCGTGACCCTGATCAACTTCTGGCCCGTGGACAGCGCCCCCGCCAGCAGCCCCCAGCTG
AGCCACGACGACACCCACAGCCGGATCGAGCACTACGCCAGCCGGCTGGCCGAGATGGAGAACAGCAACGGCAGC
TACCTGAACGACAGCATCAGCCCCAACGAGAGCATCGACGACGAGCACCTGCTGATCCAGCACTACTGCCAGAGC
CTGAACCAGGACAGCCCCCTGAGCCAGCCCCGGAGCCCCGCCCAGATCCTGATCAGCCTGGAGAGCGAGGAGCGG
GGCGAGCTGGAGCGGATCCTGGCCGACCTGGAGGAGGAGAACCGGAACCTGCAGGCCGAGTACGACCGGCTGAAG
CAGCAGCACGAGCACAAGGGCCTGAGCCCCCTGCCCAGCCCCCCCGAGATGATGCCCACCAGCCCCCAGAGCCCC
CGGGACGCCGAGCTGATCGCCGAGGCCAAGCTGCTGCGGCAGCACAAGGGCCGGCTGGAGGCCCGGATGCAGATC
CTGGAGGACCACAACAAGCAGCTGGAGAGCCAGCTGCACCGGCTGCGGCAGCTGCTGGAGCAGCCCCAGGCCGAG
GCCAAGGTGAACGGCACCACCGTGAGCAGCCCCAGCACCAGCCTGCAGCGGAGCGACAGCAGCCAGCCCATGCTG
CTGCGGGTGGTGGGCAGCCAGACCAGCGACAGCATGGGCGAGGAGGACCTGCTGAGCCCCCCCCAGGACACCAGC
ACCGGCCTGGAGGAGGTGATGGAGCAGCTGAACAACAGCTTCCCCAGCAGCCGGGGCCGGAACACCCCCGGCAAG
CCCATGCGGGAGGACACCATG
Nterm-R1_R16-R17_R24 to end:
(SEQ ID NO: 37)
ATGCTGTGGTGGGAGGAGGTGGAGGACTGCTACGAGCGGGAGGACGTGCAGAAGAAGACCTTCACCAAGTGGGTG
AACGCCCAGTTCAGCAAGTTCGGCAAGCAGCACATCGAGAACCTGTTCAGCGACCTGCAGGACGGCCGGCGGCTG
CTGGACCTGCTGGAGGGCCTGACCGGCCAGAAGCTGCCCAAGGAGAAGGGCAGCACCCGGGTGCACGCCCTGAAC
AACGTGAACAAGGCCCTGCGGGTGCTGCAGAACAACAACGTGGACCTGGTGAACATCGGCAGCACCGACATCGTG
GACGGCAACCACAAGCTGACCCTGGGCCTGATCTGGAACATCATCCTGCACTGGCAGGTGAAGAACGTGATGAAG
AACATCATGGCCGGCCTGCAGCAGACCAACAGCGAGAAGATCCTGCTGAGCTGGGTGCGGCAGAGCACCCGGAAC
TACCCCCAGGTGAACGTGATCAACTTCACCACCAGCTGGAGCGACGGCCTGGCCCTGAACGCCCTGATCCACAGC
CACCGGCCCGACCTGTTCGACTGGAACAGCGTGGTGTGCCAGCAGAGCGCCACCCAGCGGCTGGAGCACGCCTTC
AACATCGCCCGGTACCAGCTGGGCATCGAGAAGCTGCTGGACCCCGAGGACGTGGACACCACCTACCCCGACAAG
AAGAGCATCCTGATGTACATCACCAGCCTGTTCCAGGTGCTGCCCCAGCAGGTGAGCATCGAGGCCATCCAGGAG
GTGGAGATGCTGCCCCGGCCCCCCAAGGTGACCAAGGAGGAGCACTTCCAGCTGCACCACCAGATGCACTACAGC
CAGCAGATCACCGTGAGCCTGGCCCAGGGCTACGAGCGGACCAGCAGCCCCAAGCCCCGGTTCAAGAGCTACGCC
TACACCCAGGCCGCCTACGTGACCACCAGCGACCCCACCCGGAGCCCCTTCCCCAGCCAGCACCTGGAGGCCCCC
GAGGACAAGAGCTTCGGCAGCAGCCTGATGGAGAGCGAGGTGAACCTGGACCGGTACCAGACCGCCCTGGAGGAG
GTGCTGAGCTGGCTGCTGAGCGCCGAGGACACCCTGCAGGCCCAGGGCGAGATCAGCAACGACGTGGAGGTGGTG
AAGGACCAGTTCCACACCCACGAGGGCTACATGATGGACCTGACCGCCCACCAGGGCCGGGTGGGCAACATCCTG
CAGCTGGGCAGCAAGCTGATCGGCACCGGCAAGCTGAGCGAGGACGAGGAGACCGAGGTGCAGGAGCAGATGAAC
CTGCTGAACAGCCGGTGGGAGTGCCTGCGGGTGGCCAGCATGGAGAAGCAGAGCAACCTGCACCGGGTGCTGATG
GACCACACCGTGCGGGAGGAGACCATGATGGTGATGACCGAGGACATGCCCCTGGAGATCAGCTACGTGCCCAGC
ACCTACCTGACCGAGATCACCCACGTGAGCCAGGCCCTGCTGGAGGTGGAGCAGCTGCTGAACGCCCCCGACCTG
TGCGCCAAGGACTTCGAGGACCTGTTCAAGCAGGAGGAGAGCCTGAAGAACATCAAGGACAGCCTGCAGCAGAGC
AGCGGCCGGATCGACATCATCCACAGCAAGAAGACCGCCGCCCTGCAGAGCGCCACCCCCGTGGAGCGGGTGAAG
CTGCAGGAGGCCCTGAGCCAGCTGGACTTCCAGTGGGAGAAGGTGAACAAGATGTACAAGGACCGGCAGGGCCGG
TTCGACCGGAGCGTGGAGAAGTGGCGGCGGTTCCACTACGACATCAAGATCTTCAACCAGTGGCTGACCGAGGCC
GAGCAGTTCCTGCGGAAGACCCAGATCCCCGAGAACTGGGAGCACGCCAAGTACAAGTGGTACCTGAAGGAGCTG
CAGGACGGCATCGGCCAGCGGCAGACCGTGGTGCGGACCCTGAACGCCACCGGCGAGGAGATCATCCAGCAGAGC
AGCAAGACCGACGCCAGCATCCTGCAGGAGAAGCTGGGCAGCCTGAACCTGCGGTGGCAGGAGGTGTGCAAGCAG
CTGAGCGACCGGAAGAAGCGGCTGGAGGAGCAGAAGTGGCAGCGGAAGATCGACGAGACCCTGGAGCGGCTGCAG
GAGCTGCAGGAGGCCACCGACGAGCTGGACCTGAAGCTGCGGCAGGCCGAGGTGATCAAGGGCAGCTGGCAGCCC
GTGGGCGACCTGCTGATCGACAGCCTGCAGGACCACCTGGAGAAGGTGAAGGCCCTGCGGGGCGAGATCGCCCCC
CTGAAGGAGAACGTGAGCCACGTGAACGACCTGGCCCGGCAGCTGACCACCCTGGGCATCCAGCTGAGCCCCTAC
AACCTGAGCACCCTGGAGGACCTGAACACCCGGTGGAAGCTGCTGCAGGTGGCCGTGGAGGACCGGGTGCGGCAG
CTGCACGAGGCCCACCGGGACTTCGGCCCCGCCAGCCAGCACTTCCTGAGCACCAGCGTGCAGGGCCCCTGGGAG
CGGGCCATCAGCCCCAACAAGGTGCCCTACTACATCAACCACGAGACCCAGACCACCTGCTGGGACCACCCCAAG
ATGACCGAGCTGTACCAGAGCCTGGCCGACCTGAACAACGTGCGGTTCAGCGCCTACCGGACCGCCATGAAGCTG
CGGCGGCTGCAGAAGGCCCTGTGCCTGGACCTGCTGAGCCTGAGCGCCGCCTGCGACGCCCTGGACCAGCACAAC
CTGAAGCAGAACGACCAGCCCATGGACATCCTGCAGATCATCAACTGCCTGACCACCATCTACGACCGGCTGGAG
CAGGAGCACAACAACCTGGTGAACGTGCCCCTGTGCGTGGACATGTGCCTGAACTGGCTGCTGAACGTGTACGAC
ACCGGCCGGACCGGCCGGATCCGGGTGCTGAGCTTCAAGACCGGCATCATCAGCCTGTGCAAGGCCCACCTGGAG
GACAAGTACCGGTACCTGTTCAAGCAGGTGGCCAGCAGCACCGGCTTCTGCGACCAGCGGCGGCTGGGCCTGCTG
CTGCACGACAGCATCCAGATCCCCCGGCAGCTGGGCGAGGTGGCCAGCTTCGGCGGCAGCAACATCGAGCCCAGC
GTGCGGAGCTGCTTCCAGTTCGCCAACAACAAGCCCGAGATCGAGGCCGCCCTGTTCCTGGACTGGATGCGGCTG
GAGCCCCAGAGCATGGTGTGGCTGCCCGTGCTGCACCGGGTGGCCGCCGCCGAGACCGCCAAGCACCAGGCCAAG
TGCAACATCTGCAAGGAGTGCCCCATCATCGGCTTCCGGTACCGGAGCCTGAAGCACTTCAACTACGACATCTGC
CAGAGCTGCTTCTTCAGCGGCCGGGTGGCCAAGGGCCACAAGATGCACTACCCCATGGTGGAGTACTGCACCCCC
ACCACCAGCGGCGAGGACGTGCGGGACTTCGCCAAGGTGCTGAAGAACAAGTTCCGGACCAAGCGGTACTTCGCC
AAGCACCCCCGGATGGGCTACCTGCCCGTGCAGACCGTGCTGGAGGGCGACAACATGGAGACCCCCGTGACCCTG
ATCAACTTCTGGCCCGTGGACAGCGCCCCCGCCAGCAGCCCCCAGCTGAGCCACGACGACACCCACAGCCGGATC
GAGCACTACGCCAGCCGGCTGGCCGAGATGGAGAACAGCAACGGCAGCTACCTGAACGACAGCATCAGCCCCAAC
GAGAGCATCGACGACGAGCACCTGCTGATCCAGCACTACTGCCAGAGCCTGAACCAGGACAGCCCCCTGAGCCAG
CCCCGGAGCCCCGCCCAGATCCTGATCAGCCTGGAGAGCGAGGAGCGGGGCGAGCTGGAGCGGATCCTGGCCGAC
CTGGAGGAGGAGAACCGGAACCTGCAGGCCGAGTACGACCGGCTGAAGCAGCAGCACGAGCACAAGGGCCTGAGC
CCCCTGCCCAGCCCCCCCGAGATGATGCCCACCAGCCCCCAGAGCCCCCGGGACGCCGAGCTGATCGCCGAGGCC
AAGCTGCTGCGGCAGCACAAGGGCCGGCTGGAGGCCCGGATGCAGATCCTGGAGGACCACAACAAGCAGCTGGAG
AGCCAGCTGCACCGGCTGCGGCAGCTGCTGGAGCAGCCCCAGGCCGAGGCCAAGGTGAACGGCACCACCGTGAGC
AGCCCCAGCACCAGCCTGCAGCGGAGCGACAGCAGCCAGCCCATGCTGCTGCGGGTGGTGGGCAGCCAGACCAGC
GACAGCATGGGCGAGGAGGACCTGCTGAGCCCCCCCCAGGACACCAGCACCGGCCTGGAGGAGGTGATGGAGCAG
CTGAACAACAGCTTCCCCAGCAGCCGGGGCCGGAACACCCCCGGCAAGCCCATGCGGGAGGACACCATG
Nterm-R2_R16-R17_R24 to end:
(SEQ ID NO: 38)
ATGCTGTGGTGGGAGGAGGTGGAGGACTGCTACGAGCGGGAGGACGTGCAGAAGAAGACCTTCACCAAGTGGGTG
AACGCCCAGTTCAGCAAGTTCGGCAAGCAGCACATCGAGAACCTGTTCAGCGACCTGCAGGACGGCCGGCGGCTG
CTGGACCTGCTGGAGGGCCTGACCGGCCAGAAGCTGCCCAAGGAGAAGGGCAGCACCCGGGTGCACGCCCTGAAC
AACGTGAACAAGGCCCTGCGGGTGCTGCAGAACAACAACGTGGACCTGGTGAACATCGGCAGCACCGACATCGTG
GACGGCAACCACAAGCTGACCCTGGGCCTGATCTGGAACATCATCCTGCACTGGCAGGTGAAGAACGTGATGAAG
AACATCATGGCCGGCCTGCAGCAGACCAACAGCGAGAAGATCCTGCTGAGCTGGGTGCGGCAGAGCACCCGGAAC
TACCCCCAGGTGAACGTGATCAACTTCACCACCAGCTGGAGCGACGGCCTGGCCCTGAACGCCCTGATCCACAGC
CACCGGCCCGACCTGTTCGACTGGAACAGCGTGGTGTGCCAGCAGAGCGCCACCCAGCGGCTGGAGCACGCCTTC
AACATCGCCCGGTACCAGCTGGGCATCGAGAAGCTGCTGGACCCCGAGGACGTGGACACCACCTACCCCGACAAG
AAGAGCATCCTGATGTACATCACCAGCCTGTTCCAGGTGCTGCCCCAGCAGGTGAGCATCGAGGCCATCCAGGAG
GTGGAGATGCTGCCCCGGCCCCCCAAGGTGACCAAGGAGGAGCACTTCCAGCTGCACCACCAGATGCACTACAGC
CAGCAGATCACCGTGAGCCTGGCCCAGGGCTACGAGCGGACCAGCAGCCCCAAGCCCCGGTTCAAGAGCTACGCC
TACACCCAGGCCGCCTACGTGACCACCAGCGACCCCACCCGGAGCCCCTTCCCCAGCCAGCACCTGGAGGCCCCC
GAGGACAAGAGCTTCGGCAGCAGCCTGATGGAGAGCGAGGTGAACCTGGACCGGTACCAGACCGCCCTGGAGGAG
GTGCTGAGCTGGCTGCTGAGCGCCGAGGACACCCTGCAGGCCCAGGGCGAGATCAGCAACGACGTGGAGGTGGTG
AAGGACCAGTTCCACACCCACGAGGGCTACATGATGGACCTGACCGCCCACCAGGGCCGGGTGGGCAACATCCTG
CAGCTGGGCAGCAAGCTGATCGGCACCGGCAAGCTGAGCGAGGACGAGGAGACCGAGGTGCAGGAGCAGATGAAC
CTGCTGAACAGCCGGTGGGAGTGCCTGCGGGTGGCCAGCATGGAGAAGCAGAGCAACCTGCACCGGGTGCTGATG
GACCTGCAGAACCAGAAGCTGAAGGAGCTGAACGACTGGCTGACCAAGACCGAGGAGCGGACCCGGAAGATGGAG
GAGGAGCCCCTGGGCCCCGACCTGGAGGACCTGAAGCGGCAGGTGCAGCAGCACAAGGTGCTGCAGGAGGACCTG
GAGCAGGAGCAGGTGCGGGTGAACAGCCTGACCCACATGGTGGTGGTGGTGGACGAGAGCAGCGGCGACCACGCC
ACCGCCGCCCTGGAGGAGCAGCTGAAGGTGCTGGGCGACCGGTGGGCCAACATCTGCCGGTGGACCGAGGACCGG
TGGGTGCTGCTGCAGGACCACACCGTGCGGGAGGAGACCATGATGGTGATGACCGAGGACATGCCCCTGGAGATC
AGCTACGTGCCCAGCACCTACCTGACCGAGATCACCCACGTGAGCCAGGCCCTGCTGGAGGTGGAGCAGCTGCTG
AACGCCCCCGACCTGTGCGCCAAGGACTTCGAGGACCTGTTCAAGCAGGAGGAGAGCCTGAAGAACATCAAGGAC
AGCCTGCAGCAGAGCAGCGGCCGGATCGACATCATCCACAGCAAGAAGACCGCCGCCCTGCAGAGCGCCACCCCC
GTGGAGCGGGTGAAGCTGCAGGAGGCCCTGAGCCAGCTGGACTTCCAGTGGGAGAAGGTGAACAAGATGTACAAG
GACCGGCAGGGCCGGTTCGACCGGAGCGTGGAGAAGTGGCGGCGGTTCCACTACGACATCAAGATCTTCAACCAG
TGGCTGACCGAGGCCGAGCAGTTCCTGCGGAAGACCCAGATCCCCGAGAACTGGGAGCACGCCAAGTACAAGTGG
TACCTGAAGGAGCTGCAGGACGGCATCGGCCAGCGGCAGACCGTGGTGCGGACCCTGAACGCCACCGGCGAGGAG
ATCATCCAGCAGAGCAGCAAGACCGACGCCAGCATCCTGCAGGAGAAGCTGGGCAGCCTGAACCTGCGGTGGCAG
GAGGTGTGCAAGCAGCTGAGCGACCGGAAGAAGCGGCTGGAGGAGCAGAAGTGGCAGCGGAAGATCGACGAGACC
CTGGAGCGGCTGCAGGAGCTGCAGGAGGCCACCGACGAGCTGGACCTGAAGCTGCGGCAGGCCGAGGTGATCAAG
GGCAGCTGGCAGCCCGTGGGCGACCTGCTGATCGACAGCCTGCAGGACCACCTGGAGAAGGTGAAGGCCCTGCGG
GGCGAGATCGCCCCCCTGAAGGAGAACGTGAGCCACGTGAACGACCTGGCCCGGCAGCTGACCACCCTGGGCATC
CAGCTGAGCCCCTACAACCTGAGCACCCTGGAGGACCTGAACACCCGGTGGAAGCTGCTGCAGGTGGCCGTGGAG
GACCGGGTGCGGCAGCTGCACGAGGCCCACCGGGACTTCGGCCCCGCCAGCCAGCACTTCCTGAGCACCAGCGTG
CAGGGCCCCTGGGAGCGGGCCATCAGCCCCAACAAGGTGCCCTACTACATCAACCACGAGACCCAGACCACCTGC
TGGGACCACCCCAAGATGACCGAGCTGTACCAGAGCCTGGCCGACCTGAACAACGTGCGGTTCAGCGCCTACCGG
ACCGCCATGAAGCTGCGGCGGCTGCAGAAGGCCCTGTGCCTGGACCTGCTGAGCCTGAGCGCCGCCTGCGACGCC
CTGGACCAGCACAACCTGAAGCAGAACGACCAGCCCATGGACATCCTGCAGATCATCAACTGCCTGACCACCATC
TACGACCGGCTGGAGCAGGAGCACAACAACCTGGTGAACGTGCCCCTGTGCGTGGACATGTGCCTGAACTGGCTG
CTGAACGTGTACGACACCGGCCGGACCGGCCGGATCCGGGTGCTGAGCTTCAAGACCGGCATCATCAGCCTGTGC
AAGGCCCACCTGGAGGACAAGTACCGGTACCTGTTCAAGCAGGTGGCCAGCAGCACCGGCTTCTGCGACCAGCGG
CGGCTGGGCCTGCTGCTGCACGACAGCATCCAGATCCCCCGGCAGCTGGGCGAGGTGGCCAGCTTCGGCGGCAGC
AACATCGAGCCCAGCGTGCGGAGCTGCTTCCAGTTCGCCAACAACAAGCCCGAGATCGAGGCCGCCCTGTTCCTG
GACTGGATGCGGCTGGAGCCCCAGAGCATGGTGTGGCTGCCCGTGCTGCACCGGGTGGCCGCCGCCGAGACCGCC
AAGCACCAGGCCAAGTGCAACATCTGCAAGGAGTGCCCCATCATCGGCTTCCGGTACCGGAGCCTGAAGCACTTC
AACTACGACATCTGCCAGAGCTGCTTCTTCAGCGGCCGGGTGGCCAAGGGCCACAAGATGCACTACCCCATGGTG
GAGTACTGCACCCCCACCACCAGCGGCGAGGACGTGCGGGACTTCGCCAAGGTGCTGAAGAACAAGTTCCGGACC
AAGCGGTACTTCGCCAAGCACCCCCGGATGGGCTACCTGCCCGTGCAGACCGTGCTGGAGGGCGACAACATGGAG
ACCCCCGTGACCCTGATCAACTTCTGGCCCGTGGACAGCGCCCCCGCCAGCAGCCCCCAGCTGAGCCACGACGAC
ACCCACAGCCGGATCGAGCACTACGCCAGCCGGCTGGCCGAGATGGAGAACAGCAACGGCAGCTACCTGAACGAC
AGCATCAGCCCCAACGAGAGCATCGACGACGAGCACCTGCTGATCCAGCACTACTGCCAGAGCCTGAACCAGGAC
AGCCCCCTGAGCCAGCCCCGGAGCCCCGCCCAGATCCTGATCAGCCTGGAGAGCGAGGAGCGGGGCGAGCTGGAG
CGGATCCTGGCCGACCTGGAGGAGGAGAACCGGAACCTGCAGGCCGAGTACGACCGGCTGAAGCAGCAGCACGAG
CACAAGGGCCTGAGCCCCCTGCCCAGCCCCCCCGAGATGATGCCCACCAGCCCCCAGAGCCCCCGGGACGCCGAG
CTGATCGCCGAGGCCAAGCTGCTGCGGCAGCACAAGGGCCGGCTGGAGGCCCGGATGCAGATCCTGGAGGACCAC
AACAAGCAGCTGGAGAGCCAGCTGCACCGGCTGCGGCAGCTGCTGGAGCAGCCCCAGGCCGAGGCCAAGGTGAAC
GGCACCACCGTGAGCAGCCCCAGCACCAGCCTGCAGCGGAGCGACAGCAGCCAGCCCATGCTGCTGCGGGTGGTG
GGCAGCCAGACCAGCGACAGCATGGGCGAGGAGGACCTGCTGAGCCCCCCCCAGGACACCAGCACCGGCCTGGAG
GAGGTGATGGAGCAGCTGAACAACAGCTTCCCCAGCAGCCGGGGCCGGAACACCCCCGGCAAGCCCATGCGGGAG
GACACCATG
Nterm-R2_R16-R17_R24 to end of syntrophin region:
(SEQ ID NO: 39)
ATGCTGTGGTGGGAGGAGGTGGAGGACTGCTACGAGCGGGAGGACGTGCAGAAGAAGACCTTCACCAAGTGGGTG
AACGCCCAGTTCAGCAAGTTCGGCAAGCAGCACATCGAGAACCTGTTCAGCGACCTGCAGGACGGCCGGCGGCTG
CTGGACCTGCTGGAGGGCCTGACCGGCCAGAAGCTGCCCAAGGAGAAGGGCAGCACCCGGGTGCACGCCCTGAAC
AACGTGAACAAGGCCCTGCGGGTGCTGCAGAACAACAACGTGGACCTGGTGAACATCGGCAGCACCGACATCGTG
GACGGCAACCACAAGCTGACCCTGGGCCTGATCTGGAACATCATCCTGCACTGGCAGGTGAAGAACGTGATGAAG
AACATCATGGCCGGCCTGCAGCAGACCAACAGCGAGAAGATCCTGCTGAGCTGGGTGCGGCAGAGCACCCGGAAC
TACCCCCAGGTGAACGTGATCAACTTCACCACCAGCTGGAGCGACGGCCTGGCCCTGAACGCCCTGATCCACAGC
CACCGGCCCGACCTGTTCGACTGGAACAGCGTGGTGTGCCAGCAGAGCGCCACCCAGCGGCTGGAGCACGCCTTC
AACATCGCCCGGTACCAGCTGGGCATCGAGAAGCTGCTGGACCCCGAGGACGTGGACACCACCTACCCCGACAAG
AAGAGCATCCTGATGTACATCACCAGCCTGTTCCAGGTGCTGCCCCAGCAGGTGAGCATCGAGGCCATCCAGGAG
GTGGAGATGCTGCCCCGGCCCCCCAAGGTGACCAAGGAGGAGCACTTCCAGCTGCACCACCAGATGCACTACAGC
CAGCAGATCACCGTGAGCCTGGCCCAGGGCTACGAGCGGACCAGCAGCCCCAAGCCCCGGTTCAAGAGCTACGCC
TACACCCAGGCCGCCTACGTGACCACCAGCGACCCCACCCGGAGCCCCTTCCCCAGCCAGCACCTGGAGGCCCCC
GAGGACAAGAGCTTCGGCAGCAGCCTGATGGAGAGCGAGGTGAACCTGGACCGGTACCAGACCGCCCTGGAGGAG
GTGCTGAGCTGGCTGCTGAGCGCCGAGGACACCCTGCAGGCCCAGGGCGAGATCAGCAACGACGTGGAGGTGGTG
AAGGACCAGTTCCACACCCACGAGGGCTACATGATGGACCTGACCGCCCACCAGGGCCGGGTGGGCAACATCCTG
CAGCTGGGCAGCAAGCTGATCGGCACCGGCAAGCTGAGCGAGGACGAGGAGACCGAGGTGCAGGAGCAGATGAAC
CTGCTGAACAGCCGGTGGGAGTGCCTGCGGGTGGCCAGCATGGAGAAGCAGAGCAACCTGCACCGGGTGCTGATG
GACCTGCAGAACCAGAAGCTGAAGGAGCTGAACGACTGGCTGACCAAGACCGAGGAGCGGACCCGGAAGATGGAG
GAGGAGCCCCTGGGCCCCGACCTGGAGGACCTGAAGCGGCAGGTGCAGCAGCACAAGGTGCTGCAGGAGGACCTG
GAGCAGGAGCAGGTGCGGGTGAACAGCCTGACCCACATGGTGGTGGTGGTGGACGAGAGCAGCGGCGACCACGCC
ACCGCCGCCCTGGAGGAGCAGCTGAAGGTGCTGGGCGACCGGTGGGCCAACATCTGCCGGTGGACCGAGGACCGG
TGGGTGCTGCTGCAGGACCACACCGTGCGGGAGGAGACCATGATGGTGATGACCGAGGACATGCCCCTGGAGATC
AGCTACGTGCCCAGCACCTACCTGACCGAGATCACCCACGTGAGCCAGGCCCTGCTGGAGGTGGAGCAGCTGCTG
AACGCCCCCGACCTGTGCGCCAAGGACTTCGAGGACCTGTTCAAGCAGGAGGAGAGCCTGAAGAACATCAAGGAC
AGCCTGCAGCAGAGCAGCGGCCGGATCGACATCATCCACAGCAAGAAGACCGCCGCCCTGCAGAGCGCCACCCCC
GTGGAGCGGGTGAAGCTGCAGGAGGCCCTGAGCCAGCTGGACTTCCAGTGGGAGAAGGTGAACAAGATGTACAAG
GACCGGCAGGGCCGGTTCGACCGGAGCGTGGAGAAGTGGCGGCGGTTCCACTACGACATCAAGATCTTCAACCAG
TGGCTGACCGAGGCCGAGCAGTTCCTGCGGAAGACCCAGATCCCCGAGAACTGGGAGCACGCCAAGTACAAGTGG
TACCTGAAGGAGCTGCAGGACGGCATCGGCCAGCGGCAGACCGTGGTGCGGACCCTGAACGCCACCGGCGAGGAG
ATCATCCAGCAGAGCAGCAAGACCGACGCCAGCATCCTGCAGGAGAAGCTGGGCAGCCTGAACCTGCGGTGGCAG
GAGGTGTGCAAGCAGCTGAGCGACCGGAAGAAGCGGCTGGAGGAGCAGAAGTGGCAGCGGAAGATCGACGAGACC
CTGGAGCGGCTGCAGGAGCTGCAGGAGGCCACCGACGAGCTGGACCTGAAGCTGCGGCAGGCCGAGGTGATCAAG
GGCAGCTGGCAGCCCGTGGGCGACCTGCTGATCGACAGCCTGCAGGACCACCTGGAGAAGGTGAAGGCCCTGCGG
GGCGAGATCGCCCCCCTGAAGGAGAACGTGAGCCACGTGAACGACCTGGCCCGGCAGCTGACCACCCTGGGCATC
CAGCTGAGCCCCTACAACCTGAGCACCCTGGAGGACCTGAACACCCGGTGGAAGCTGCTGCAGGTGGCCGTGGAG
GACCGGGTGCGGCAGCTGCACGAGGCCCACCGGGACTTCGGCCCCGCCAGCCAGCACTTCCTGAGCACCAGCGTG
CAGGGCCCCTGGGAGCGGGCCATCAGCCCCAACAAGGTGCCCTACTACATCAACCACGAGACCCAGACCACCTGC
TGGGACCACCCCAAGATGACCGAGCTGTACCAGAGCCTGGCCGACCTGAACAACGTGCGGTTCAGCGCCTACCGG
ACCGCCATGAAGCTGCGGCGGCTGCAGAAGGCCCTGTGCCTGGACCTGCTGAGCCTGAGCGCCGCCTGCGACGCC
CTGGACCAGCACAACCTGAAGCAGAACGACCAGCCCATGGACATCCTGCAGATCATCAACTGCCTGACCACCATC
TACGACCGGCTGGAGCAGGAGCACAACAACCTGGTGAACGTGCCCCTGTGCGTGGACATGTGCCTGAACTGGCTG
CTGAACGTGTACGACACCGGCCGGACCGGCCGGATCCGGGTGCTGAGCTTCAAGACCGGCATCATCAGCCTGTGC
AAGGCCCACCTGGAGGACAAGTACCGGTACCTGTTCAAGCAGGTGGCCAGCAGCACCGGCTTCTGCGACCAGCGG
CGGCTGGGCCTGCTGCTGCACGACAGCATCCAGATCCCCCGGCAGCTGGGCGAGGTGGCCAGCTTCGGCGGCAGC
AACATCGAGCCCAGCGTGCGGAGCTGCTTCCAGTTCGCCAACAACAAGCCCGAGATCGAGGCCGCCCTGTTCCTG
GACTGGATGCGGCTGGAGCCCCAGAGCATGGTGTGGCTGCCCGTGCTGCACCGGGTGGCCGCCGCCGAGACCGCC
AAGCACCAGGCCAAGTGCAACATCTGCAAGGAGTGCCCCATCATCGGCTTCCGGTACCGGAGCCTGAAGCACTTC
AACTACGACATCTGCCAGAGCTGCTTCTTCAGCGGCCGGGTGGCCAAGGGCCACAAGATGCACTACCCCATGGTG
GAGTACTGCACCCCCACCACCAGCGGCGAGGACGTGCGGGACTTCGCCAAGGTGCTGAAGAACAAGTTCCGGACC
AAGCGGTACTTCGCCAAGCACCCCCGGATGGGCTACCTGCCCGTGCAGACCGTGCTGGAGGGCGACAACATGGAG
ACCCCCGTGACCCTGATCAACTTCTGGCCCGTGGACAGCGCCCCCGCCAGCAGCCCCCAGCTGAGCCACGACGAC
ACCCACAGCCGGATCGAGCACTACGCCAGCCGGCTGGCCGAGATGGAGAACAGCAACGGCAGCTACCTGAACGAC
AGCATCAGCCCCAACGAGAGCATCGACGACGAGCACCTGCTGATCCAGCACTACTGCCAGAGCCTGAACCAGGAC
AGCCCCCTGAGCCAGCCCCGGAGC

[0115] In some embodiments, a micro-dystrophin protein as described herein further comprises one or more utrophin protein domains. Non-limiting examples of nucleotide sequences encoding human chimeric utrophin-dystrophin micro-dystrophin proteins optimized for skeletal muscle are described below.

Utrophin N-terminus through R2_Dystrophin R16-R17_R24 + H4 + trCterm:
Human sequences without codon alterations:
(SEQ ID NO: 102)
ATGGCCAAGTATGGAGAACATGAAGCCAGTCCTGACAATGGGCAGAACGAATTCAGTGATATCATTAAGTCCAGA
TCTGATGAACACAATGACGTACAGAAGAAAACCTTTACCAAATGGATAAATGCTCGATTTTCAAAGAGTGGGAAA
CCACCCATCAATGATATGTTCACAGACCTCAAAGATGGAAGGAAGCTATTGGATCTTCTAGAAGGCCTCACAGGA
ACATCACTGCCAAAGGAACGTGGTTCCACAAGGGTACATGCCTTAAATAACGTCAACAGAGTGCTGCAGGTTTTA
CATCAGAACAATGTGGAATTAGTGAATATAGGGGGAACTGACATTGTGGATGGAAATCACAAACTGACTTTGGGG
TTACTTTGGAGCATCATTTTGCACTGGCAGGTGAAAGATGTCATGAAGGATGTCATGTCGGACCTGCAGCAGACG
AACAGTGAGAAGATCCTGCTCAGCTGGGTGCGTCAGACCACCAGGCCCTACAGCCAAGTCAACGTCCTCAACTTC
ACCACCAGCTGGACAGATGGACTCGCCTTTAATGCTGTCCTCCACCGACATAAACCTGATCTCTTCAGCTGGGAT
AAAGTTGTCAAAATGTCACCAATTGAGAGACTTGAACATGCCTTCAGCAAGGCTCAAACTTATTTGGGAATTGAA
AAGCTGTTAGATCCTGAAGATGTTGCCGTTCAGCTTCCTGACAAGAAATCCATAATTATGTATTTAACATCTTTG
TTTGAGGTGCTACCTCAGCAAGTCACCATAGACGCCATCCGTGAGGTAGAGACACTCCCAAGGAAATATAAAAAA
GAATGTGAAGAAGAGGCAATTAATATACAGAGTACAGCGCCTGAGGAGGAGCATGAGAGTCCCCGAGCTGAAACT
CCCAGCACTGTCACTGAGGTTGACATGGATCTGGACAGCTATCAGATTGCGTTGGAGGAAGTGCTGACCTGGTTG
CTTTCTGCTGAGGACACTTTCCAGGAGCAGGATGATATTTCTGATGATGTTGAAGAAGTCAAAGACCAGTTTGCA
ACCCATGAAGCTTTTATGATGGAACTGACTGCACACCAGAGCAGTGTGGGCAGCGTCCTGCAGGCAGGCAACCAA
CTGATAACACAAGGAACTCTGTCAGACGAAGAAGAATTTGAGATTCAGGAACAGATGACCCTGCTGAATGCTAGA
TGGGAGGCTCTTAGGGTGGAGAGTATGGACAGACAGTCCCGGCTGCACGATGTGCTGATGGAACTGCAGAAGAAG
CAACTGCAGCAGCTCTCCGCCTGGTTAACACTCACAGAGGAGCGCATTCAGAAGATGGAAACTTGCCCCCTGGAT
GATGATGTAAAATCTCTACAAAAGCTGCTAGAAGAACATAAAAGTTTGCAAAGTGATCTTGAGGCTGAACAGGTG
AAAGTAAATTCACTAACTCACATGGTGGTCATTGTTGATGAAAACAGTGGTGAGAGTGCTACAGCTATCCTAGAA
GACCAGTTACAGAAACTTGGTGAGCGCTGGACAGCAGTATGCCGTTGGACTGAAGAACGCTGGAATAGGTTACAA
GAAATCGCCGCTAGCGCCATGATGGTGATGACTGAAGACATGCCTTTGGAAATTTCTTATGTGCCTTCTACTTAT
TTGACTGAAATCACTCATGTCTCACAAGCCCTATTAGAAGTGGAACAACTTCTCAATGCTCCTGACCTCTGTGCT
AAGGACTTTGAAGATCTCTTTAAGCAAGAGGAGTCTCTGAAGAATATAAAAGATAGTCTACAACAAAGCTCAGGT
CGGATTGACATTATTCATAGCAAGAAGACAGCAGCATTGCAAAGTGCAACGCCTGTGGAAAGGGTGAAGCTACAG
GAAGCTCTCTCCCAGCTTGATTTCCAATGGGAAAAAGTTAACAAAATGTACAAGGACCGACAAGGGCGATTTGAC
AGATCTGTTGAGAAATGGCGGCGTTTTCATTATGATATAAAGATATTTAATCAGTGGCTAACAGAAGCTGAACAG
TTTCTCAGAAAGACACAAATTCCTGAGAATTGGGAACATGCTAAATACAAATGGTATCTTAAGGAACTCCAGGAT
GGCATTGGGCAGCGGCAAACTGTTGTCAGAACATTGAATGCAACTGGGGAAGAAATAATTCAGCAATCCTCAAAA
ACAGATGCCAGTATTCTACAGGAAAAATTGGGAAGCCTGAATCTGCGGTGGCAGGAGGTCTGCAAACAGCTGTCA
GACAGAAAAAAGAGGCTAGAAGAACAAAAGTGGCAGAGAAAAATAGATGAGACCCTTGAAAGACTCCGGGAACTT
CAAGAGGCCACGGATGAGCTGGACCTCAAGCTGCGCCAAGCTGAGGTGATCAAGGGATCCTGGCAGCCCGTGGGC
GATCTCCTCATTGACTCTCTCCAAGATCACCTCGAGAAAGTCAAGGCACTTCGAGGAGAAATTGCGCCTCTGAAA
GAGAACGTGAGCCACGTCAATGACCTTGCTCGCCAGCTTACCACTTTGGGCATTCAGCTCTCACCGTATAACCTC
AGCACTCTGGAAGACCTGAACACCAGATGGAAGCTTCTGCAGGTGGCCGTCGAGGACCGAGTCAGGCAGCTGCAT
GAAGCCCACAGGGACTTTGGTCCAGCATCTCAGCACTTTCTTTCCACGTCTGTCCAGGGTCCCTGGGAGAGAGCC
ATCTCGCCAAACAAAGTGCCCTACTATATCAACCACGAGACTCAAACAACTTGCTGGGACCATCCCAAAATGACA
GAGCTCTACCAGTCTTTAGCTGACCTGAATAATGTCAGATTCTCAGCTTATAGGACTGCCATGAAACTCCGAAGA
CTGCAGAAGGCCCTTTGCTTGGATCTCTTGAGCCTGTCAGCTGCATGTGATGCCTTGGACCAGCACAACCTCAAG
CAAAATGACCAGCCCATGGATATCCTGCAGATTATTAATTGTTTGACCACTATTTATGACCGCCTGGAGCAAGAG
CACAACAATTTGGTCAACGTCCCTCTCTGCGTGGATATGTGTCTGAACTGGCTGCTGAATGTTTATGATACGGGA
CGAACAGGGAGGATCCGTGTCCTGTCTTTTAAAACTGGCATCATTTCCCTGTGTAAAGCACATTTGGAAGACAAG
TACAGATACCTTTTCAAGCAAGTGGCAAGTTCAACAGGATTTTGTGACCAGCGCAGGCTGGGCCTCCTTCTGCAT
GATTCTATCCAAATTCCAAGACAGTTGGGTGAAGTTGCATCCTTTGGGGGCAGTAACATTGAGCCAAGTGTCCGG
AGCTGCTTCCAATTTGCTAATAATAAGCCAGAGATCGAAGCGGCCCTCTTCCTAGACTGGATGAGACTGGAACCC
CAGTCCATGGTGTGGCTGCCCGTCCTGCACAGAGTGGCTGCTGCAGAAACTGCCAAGCATCAGGCCAAATGTAAC
ATCTGCAAAGAGTGTCCAATCATTGGATTCAGGTACAGGAGTCTAAAGCACTTTAATTATGACATCTGCCAAAGC
TGCTTTTTTTCTGGTCGAGTTGCAAAAGGCCATAAAATGCACTATCCCATGGTGGAATATTGCACTCCGACTACA
TCAGGAGAAGATGTTCGAGACTTTGCCAAGGTACTAAAAAACAAATTTCGAACCAAAAGGTATTTTGCGAAGCAT
CCCCGAATGGGCTACCTGCCAGTGCAGACTGTCTTAGAGGGGGACAACATGGAAACTCCC
Human sequences with codon optimization:
(SEQ ID NO: 103)
ATGGCCAAGTACGGCGAGCACGAGGCCAGCCCCGACAACGGCCAGAACGAGTTCAGCGACATCATCAAGAGCCGG
AGCGACGAGCACAACGACGTGCAGAAGAAGACCTTCACCAAGTGGATCAACGCCCGGTTCAGCAAGAGCGGCAAG
CCCCCCATCAACGACATGTTCACCGACCTGAAGGACGGCCGGAAGCTGCTGGACCTGCTGGAGGGCCTGACCGGC
ACCAGCCTGCCCAAGGAGCGGGGCAGCACCCGGGTGCACGCCCTGAACAACGTGAACCGGGTGCTGCAGGTGCTG
CACCAGAACAACGTGGAGCTGGTGAACATCGGCGGCACCGACATCGTGGACGGCAACCACAAGCTGACCCTGGGC
CTGCTGTGGAGCATCATCCTGCACTGGCAGGTGAAGGACGTGATGAAGGACGTGATGAGCGACCTGCAGCAGACC
AACAGCGAGAAGATCCTGCTGAGCTGGGTGCGGCAGACCACCCGGCCCTACAGCCAGGTGAACGTGCTGAACTTC
ACCACCAGCTGGACCGACGGCCTGGCCTTCAACGCCGTGCTGCACCGGCACAAGCCCGACCTGTTCAGCTGGGAC
AAGGTGGTGAAGATGAGCCCCATCGAGCGGCTGGAGCACGCCTTCAGCAAGGCCCAGACCTACCTGGGCATCGAG
AAGCTGCTGGACCCCGAGGACGTGGCCGTGCAGCTGCCCGACAAGAAGAGCATCATCATGTACCTGACCAGCCTG
TTCGAGGTGCTGCCCCAGCAGGTGACCATCGACGCCATCCGGGAGGTGGAGACCCTGCCCCGGAAGTACAAGAAG
GAGTGCGAGGAGGAGGCCATCAACATCCAGAGCACCGCCCCCGAGGAGGAGCACGAGAGCCCCCGGGCCGAGACC
CCCAGCACCGTGACCGAGGTGGACATGGACCTGGACAGCTACCAGATCGCCCTGGAGGAGGTGCTGACCTGGCTG
CTGAGCGCCGAGGACACCTTCCAGGAGCAGGACGACATCAGCGACGACGTGGAGGAGGTGAAGGACCAGTTCGCC
ACCCACGAGGCCTTCATGATGGAGCTGACCGCCCACCAGAGCAGCGTGGGCAGCGTGCTGCAGGCCGGCAACCAG
CTGATCACCCAGGGCACCCTGAGCGACGAGGAGGAGTTCGAGATCCAGGAGCAGATGACCCTGCTGAACGCCCGG
TGGGAGGCCCTGCGGGTGGAGAGCATGGACCGGCAGAGCCGGCTGCACGACGTGCTGATGGAGCTGCAGAAGAAG
CAGCTGCAGCAGCTGAGCGCCTGGCTGACCCTGACCGAGGAGCGGATCCAGAAGATGGAGACCTGCCCCCTGGAC
GACGACGTGAAGAGCCTGCAGAAGCTGCTGGAGGAGCACAAGAGCCTGCAGAGCGACCTGGAGGCCGAGCAGGTG
AAGGTGAACAGCCTGACCCACATGGTGGTGATCGTGGACGAGAACAGCGGCGAGAGCGCCACCGCCATCCTGGAG
GACCAGCTGCAGAAGCTGGGCGAGCGGTGGACCGCCGTGTGCCGGTGGACCGAGGAGCGGTGGAACCGGCTGCAG
GAGATCGCCGCTAGCGCCATGATGGTGATGACCGAGGACATGCCCCTGGAGATCAGCTACGTGCCCAGCACCTAC
CTGACCGAGATCACCCACGTGAGCCAGGCCCTGCTGGAGGTGGAGCAGCTGCTGAACGCCCCCGACCTGTGCGCC
AAGGACTTCGAGGACCTGTTCAAGCAGGAGGAGAGCCTGAAGAACATCAAGGACAGCCTGCAGCAGAGCAGCGGC
CGGATCGACATCATCCACAGCAAGAAGACCGCCGCCCTGCAGAGCGCCACCCCCGTGGAGCGGGTGAAGCTGCAG
GAGGCCCTGAGCCAGCTGGACTTCCAGTGGGAGAAGGTGAACAAGATGTACAAGGACCGGCAGGGCCGGTTCGAC
CGGAGCGTGGAGAAGTGGCGGCGGTTCCACTACGACATCAAGATCTTCAACCAGTGGCTGACCGAGGCCGAGCAG
TTCCTGCGGAAGACCCAGATCCCCGAGAACTGGGAGCACGCCAAGTACAAGTGGTACCTGAAGGAGCTGCAGGAC
GGCATCGGCCAGCGGCAGACCGTGGTGCGGACCCTGAACGCCACCGGCGAGGAGATCATCCAGCAGAGCAGCAAG
ACCGACGCCAGCATCCTGCAGGAGAAGCTGGGCAGCCTGAACCTGCGGTGGCAGGAGGTGTGCAAGCAGCTGAGC
GACCGGAAGAAGCGGCTGGAGGAGCAGAAGTGGCAGCGGAAGATCGACGAGACCCTGGAGCGGCTGCAGGAGCTG
CAGGAGGCCACCGACGAGCTGGACCTGAAGCTGCGGCAGGCCGAGGTGATCAAGGGCAGCTGGCAGCCCGTGGGC
GACCTGCTGATCGACAGCCTGCAGGACCACCTGGAGAAGGTGAAGGCCCTGCGGGGCGAGATCGCCCCCCTGAAG
GAGAACGTGAGCCACGTGAACGACCTGGCCCGGCAGCTGACCACCCTGGGCATCCAGCTGAGCCCCTACAACCTG
AGCACCCTGGAGGACCTGAACACCCGGTGGAAGCTGCTGCAGGTGGCCGTGGAGGACCGGGTGCGGCAGCTGCAC
GAGGCCCACCGGGACTTCGGCCCCGCCAGCCAGCACTTCCTGAGCACCAGCGTGCAGGGCCCCTGGGAGCGGGCC
ATCAGCCCCAACAAGGTGCCCTACTACATCAACCACGAGACCCAGACCACCTGCTGGGACCACCCCAAGATGACC
GAGCTGTACCAGAGCCTGGCCGACCTGAACAACGTGCGGTTCAGCGCCTACCGGACCGCCATGAAGCTGCGGCGG
CTGCAGAAGGCCCTGTGCCTGGACCTGCTGAGCCTGAGCGCCGCCTGCGACGCCCTGGACCAGCACAACCTGAAG
CAGAACGACCAGCCCATGGACATCCTGCAGATCATCAACTGCCTGACCACCATCTACGACCGGCTGGAGCAGGAG
CACAACAACCTGGTGAACGTGCCCCTGTGCGTGGACATGTGCCTGAACTGGCTGCTGAACGTGTACGACACCGGC
CGGACCGGCCGGATCCGGGTGCTGAGCTTCAAGACCGGCATCATCAGCCTGTGCAAGGCCCACCTGGAGGACAAG
TACCGGTACCTGTTCAAGCAGGTGGCCAGCAGCACCGGCTTCTGCGACCAGCGGCGGCTGGGCCTGCTGCTGCAC
GACAGCATCCAGATCCCCCGGCAGCTGGGCGAGGTGGCCAGCTTCGGCGGCAGCAACATCGAGCCCAGCGTGCGG
AGCTGCTTCCAGTTCGCCAACAACAAGCCCGAGATCGAGGCCGCCCTGTTCCTGGACTGGATGCGGCTGGAGCCC
CAGAGCATGGTGTGGCTGCCCGTGCTGCACCGGGTGGCCGCCGCCGAGACCGCCAAGCACCAGGCCAAGTGCAAC
ATCTGCAAGGAGTGCCCCATCATCGGCTTCCGGTACCGGAGCCTGAAGCACTTCAACTACGACATCTGCCAGAGC
TGCTTCTTCAGCGGCCGGGTGGCCAAGGGCCACAAGATGCACTACCCCATGGTGGAGTACTGCACCCCCACCACC
AGCGGCGAGGACGTGCGGGACTTCGCCAAGGTGCTGAAGAACAAGTTCCGGACCAAGCGGTACTTCGCCAAGCAC
CCCCGGATGGGCTACCTGCCCGTGCAGACCGTGCTGGAGGGCGACAACATGGAGACCCCC
Utrophin N-terminus through R2_Dystrophin R16-R17_H4 to end of syntrophin region:
Human sequences without codon alterations:
(SEQ ID NO: 104)
ATGGCCAAGTATGGAGAACATGAAGCCAGTCCTGACAATGGGCAGAACGAATTCAGTGATATCATTAAGTCCAGA
TCTGATGAACACAATGACGTACAGAAGAAAACCTTTACCAAATGGATAAATGCTCGATTTTCAAAGAGTGGGAAA
CCACCCATCAATGATATGTTCACAGACCTCAAAGATGGAAGGAAGCTATTGGATCTTCTAGAAGGCCTCACAGGA
ACATCACTGCCAAAGGAACGTGGTTCCACAAGGGTACATGCCTTAAATAACGTCAACAGAGTGCTGCAGGTTTTA
CATCAGAACAATGTGGAATTAGTGAATATAGGGGGAACTGACATTGTGGATGGAAATCACAAACTGACTTTGGGG
TTACTTTGGAGCATCATTTTGCACTGGCAGGTGAAAGATGTCATGAAGGATGTCATGTCGGACCTGCAGCAGACG
AACAGTGAGAAGATCCTGCTCAGCTGGGTGCGTCAGACCACCAGGCCCTACAGCCAAGTCAACGTCCTCAACTTC
ACCACCAGCTGGACAGATGGACTCGCCTTTAATGCTGTCCTCCACCGACATAAACCTGATCTCTTCAGCTGGGAT
AAAGTTGTCAAAATGTCACCAATTGAGAGACTTGAACATGCCTTCAGCAAGGCTCAAACTTATTTGGGAATTGAA
AAGCTGTTAGATCCTGAAGATGTTGCCGTTCAGCTTCCTGACAAGAAATCCATAATTATGTATTTAACATCTTTG
TTTGAGGTGCTACCTCAGCAAGTCACCATAGACGCCATCCGTGAGGTAGAGACACTCCCAAGGAAATATAAAAAA
GAATGTGAAGAAGAGGCAATTAATATACAGAGTACAGCGCCTGAGGAGGAGCATGAGAGTCCCCGAGCTGAAACT
CCCAGCACTGTCACTGAGGTTGACATGGATCTGGACAGCTATCAGATTGCGTTGGAGGAAGTGCTGACCTGGTTG
CTTTCTGCTGAGGACACTTTCCAGGAGCAGGATGATATTTCTGATGATGTTGAAGAAGTCAAAGACCAGTTTGCA
ACCCATGAAGCTTTTATGATGGAACTGACTGCACACCAGAGCAGTGTGGGCAGCGTCCTGCAGGCAGGCAACCAA
CTGATAACACAAGGAACTCTGTCAGACGAAGAAGAATTTGAGATTCAGGAACAGATGACCCTGCTGAATGCTAGA
TGGGAGGCTCTTAGGGTGGAGAGTATGGACAGACAGTCCCGGCTGCACGATGTGCTGATGGAACTGCAGAAGAAG
CAACTGCAGCAGCTCTCCGCCTGGTTAACACTCACAGAGGAGCGCATTCAGAAGATGGAAACTTGCCCCCTGGAT
GATGATGTAAAATCTCTACAAAAGCTGCTAGAAGAACATAAAAGTTTGCAAAGTGATCTTGAGGCTGAACAGGTG
AAAGTAAATTCACTAACTCACATGGTGGTCATTGTTGATGAAAACAGTGGTGAGAGTGCTACAGCTATCCTAGAA
GACCAGTTACAGAAACTTGGTGAGCGCTGGACAGCAGTATGCCGTTGGACTGAAGAACGCTGGAATAGGTTACAA
GAAATCGCCGCTAGCGCCATGATGGTGATGACTGAAGACATGCCTTTGGAAATTTCTTATGTGCCTTCTACTTAT
TTGACTGAAATCACTCATGTCTCACAAGCCCTATTAGAAGTGGAACAACTTCTCAATGCTCCTGACCTCTGTGCT
AAGGACTTTGAAGATCTCTTTAAGCAAGAGGAGTCTCTGAAGAATATAAAAGATAGTCTACAACAAAGCTCAGGT
CGGATTGACATTATTCATAGCAAGAAGACAGCAGCATTGCAAAGTGCAACGCCTGTGGAAAGGGTGAAGCTACAG
GAAGCTCTCTCCCAGCTTGATTTCCAATGGGAAAAAGTTAACAAAATGTACAAGGACCGACAAGGGCGATTTGAC
AGATCTGTTGAGAAATGGCGGCGTTTTCATTATGATATAAAGATATTTAATCAGTGGCTAACAGAAGCTGAACAG
TTTCTCAGAAAGACACAAATTCCTGAGAATTGGGAACATGCTAAATACAAATGGTATCTTAAGGAACTCCAGGAT
GGCATTGGGCAGCGGCAAACTGTTGTCAGAACATTGAATGCAACTGGGGAAGAAATAATTCAGCAATCCTCAAAA
ACAGATGCCAGTATTCTACAGGAAAAATTGGGAAGCCTGAATCTGCGGTGGCAGGAGGTCTGCAAACAGCTGTCA
GACAGAAAAAAGAGGCTAGAAGAACAAAAGGGTCCAGCATCTCAGCACTTTCTTTCCACGTCTGTCCAGGGTCCC
TGGGAGAGAGCCATCTCGCCAAACAAAGTGCCCTACTATATCAACCACGAGACTCAAACAACTTGCTGGGACCAT
CCCAAAATGACAGAGCTCTACCAGTCTTTAGCTGACCTGAATAATGTCAGATTCTCAGCTTATAGGACTGCCATG
AAACTCCGAAGACTGCAGAAGGCCCTTTGCTTGGATCTCTTGAGCCTGTCAGCTGCATGTGATGCCTTGGACCAG
CACAACCTCAAGCAAAATGACCAGCCCATGGATATCCTGCAGATTATTAATTGTTTGACCACTATTTATGACCGC
CTGGAGCAAGAGCACAACAATTTGGTCAACGTCCCTCTCTGCGTGGATATGTGTCTGAACTGGCTGCTGAATGTT
TATGATACGGGACGAACAGGGAGGATCCGTGTCCTGTCTTTTAAAACTGGCATCATTTCCCTGTGTAAAGCACAT
TTGGAAGACAAGTACAGATACCTTTTCAAGCAAGTGGCAAGTTCAACAGGATTTTGTGACCAGCGCAGGCTGGGC
CTCCTTCTGCATGATTCTATCCAAATTCCAAGACAGTTGGGTGAAGTTGCATCCTTTGGGGGCAGTAACATTGAG
CCAAGTGTCCGGAGCTGCTTCCAATTTGCTAATAATAAGCCAGAGATCGAAGCGGCCCTCTTCCTAGACTGGATG
AGACTGGAACCCCAGTCCATGGTGTGGCTGCCCGTCCTGCACAGAGTGGCTGCTGCAGAAACTGCCAAGCATCAG
GCCAAATGTAACATCTGCAAAGAGTGTCCAATCATTGGATTCAGGTACAGGAGTCTAAAGCACTTTAATTATGAC
ATCTGCCAAAGCTGCTTTTTTTCTGGTCGAGTTGCAAAAGGCCATAAAATGCACTATCCCATGGTGGAATATTGC
ACTCCGACTACATCAGGAGAAGATGTTCGAGACTTTGCCAAGGTACTAAAAAACAAATTTCGAACCAAAAGGTAT
TTTGCGAAGCATCCCCGAATGGGCTACCTGCCAGTGCAGACTGTCTTAGAGGGGGACAACATGGAAACTCCCGTT
ACTCTGATCAACTTCTGGCCAGTAGATTCTGCGCCTGCCTCGTCCCCTCAGCTTTCACACGATGATACTCATTCA
CGCATTGAACATTATGCTAGCAGGCTAGCAGAAATGGAAAACAGCAATGGATCTTATCTAAATGATAGCATCTCT
CCTAATGAGAGCATAGATGATGAACATTTGTTAATCCAGCATTACTGCCAAAGTTTGAACCAGGACTCCCCCCTG
AGCCAGCCTCGTAGT
Human sequences with codon optimization:
(SEQ ID NO: 105)
ATGGCCAAGTACGGCGAGCACGAGGCCAGCCCCGACAACGGCCAGAACGAGTTCAGCGACATCATCAAGAGCCGG
AGCGACGAGCACAACGACGTGCAGAAGAAGACCTTCACCAAGTGGATCAACGCCCGGTTCAGCAAGAGCGGCAAG
CCCCCCATCAACGACATGTTCACCGACCTGAAGGACGGCCGGAAGCTGCTGGACCTGCTGGAGGGCCTGACCGGC
ACCAGCCTGCCCAAGGAGCGGGGCAGCACCCGGGTGCACGCCCTGAACAACGTGAACCGGGTGCTGCAGGTGCTG
CACCAGAACAACGTGGAGCTGGTGAACATCGGCGGCACCGACATCGTGGACGGCAACCACAAGCTGACCCTGGGC
CTGCTGTGGAGCATCATCCTGCACTGGCAGGTGAAGGACGTGATGAAGGACGTGATGAGCGACCTGCAGCAGACC
AACAGCGAGAAGATCCTGCTGAGCTGGGTGCGGCAGACCACCCGGCCCTACAGCCAGGTGAACGTGCTGAACTTC
ACCACCAGCTGGACCGACGGCCTGGCCTTCAACGCCGTGCTGCACCGGCACAAGCCCGACCTGTTCAGCTGGGAC
AAGGTGGTGAAGATGAGCCCCATCGAGCGGCTGGAGCACGCCTTCAGCAAGGCCCAGACCTACCTGGGCATCGAG
AAGCTGCTGGACCCCGAGGACGTGGCCGTGCAGCTGCCCGACAAGAAGAGCATCATCATGTACCTGACCAGCCTG
TTCGAGGTGCTGCCCCAGCAGGTGACCATCGACGCCATCCGGGAGGTGGAGACCCTGCCCCGGAAGTACAAGAAG
GAGTGCGAGGAGGAGGCCATCAACATCCAGAGCACCGCCCCCGAGGAGGAGCACGAGAGCCCCCGGGCCGAGACC
CCCAGCACCGTGACCGAGGTGGACATGGACCTGGACAGCTACCAGATCGCCCTGGAGGAGGTGCTGACCTGGCTG
CTGAGCGCCGAGGACACCTTCCAGGAGCAGGACGACATCAGCGACGACGTGGAGGAGGTGAAGGACCAGTTCGCC
ACCCACGAGGCCTTCATGATGGAGCTGACCGCCCACCAGAGCAGCGTGGGCAGCGTGCTGCAGGCCGGCAACCAG
CTGATCACCCAGGGCACCCTGAGCGACGAGGAGGAGTTCGAGATCCAGGAGCAGATGACCCTGCTGAACGCCCGG
TGGGAGGCCCTGCGGGTGGAGAGCATGGACCGGCAGAGCCGGCTGCACGACGTGCTGATGGAGCTGCAGAAGAAG
CAGCTGCAGCAGCTGAGCGCCTGGCTGACCCTGACCGAGGAGCGGATCCAGAAGATGGAGACCTGCCCCCTGGAC
GACGACGTGAAGAGCCTGCAGAAGCTGCTGGAGGAGCACAAGAGCCTGCAGAGCGACCTGGAGGCCGAGCAGGTG
AAGGTGAACAGCCTGACCCACATGGTGGTGATCGTGGACGAGAACAGCGGCGAGAGCGCCACCGCCATCCTGGAG
GACCAGCTGCAGAAGCTGGGCGAGCGGTGGACCGCCGTGTGCCGGTGGACCGAGGAGCGGTGGAACCGGCTGCAG
GAGATCGCCGCTAGCGCCATGATGGTGATGACCGAGGACATGCCCCTGGAGATCAGCTACGTGCCCAGCACCTAC
CTGACCGAGATCACCCACGTGAGCCAGGCCCTGCTGGAGGTGGAGCAGCTGCTGAACGCCCCCGACCTGTGCGCC
AAGGACTTCGAGGACCTGTTCAAGCAGGAGGAGAGCCTGAAGAACATCAAGGACAGCCTGCAGCAGAGCAGCGGC
CGGATCGACATCATCCACAGCAAGAAGACCGCCGCCCTGCAGAGCGCCACCCCCGTGGAGCGGGTGAAGCTGCAG
GAGGCCCTGAGCCAGCTGGACTTCCAGTGGGAGAAGGTGAACAAGATGTACAAGGACCGGCAGGGCCGGTTCGAC
CGGAGCGTGGAGAAGTGGCGGCGGTTCCACTACGACATCAAGATCTTCAACCAGTGGCTGACCGAGGCCGAGCAG
TTCCTGCGGAAGACCCAGATCCCCGAGAACTGGGAGCACGCCAAGTACAAGTGGTACCTGAAGGAGCTGCAGGAC
GGCATCGGCCAGCGGCAGACCGTGGTGCGGACCCTGAACGCCACCGGCGAGGAGATCATCCAGCAGAGCAGCAAG
ACCGACGCCAGCATCCTGCAGGAGAAGCTGGGCAGCCTGAACCTGCGGTGGCAGGAGGTGTGCAAGCAGCTGAGC
GACCGGAAGAAGCGGCTGGAGGAGCAGAAGGGCCCCGCCAGCCAGCACTTCCTGAGCACCAGCGTGCAGGGCCCC
TGGGAGCGGGCCATCAGCCCCAACAAGGTGCCCTACTACATCAACCACGAGACCCAGACCACCTGCTGGGACCAC
CCCAAGATGACCGAGCTGTACCAGAGCCTGGCCGACCTGAACAACGTGCGGTTCAGCGCCTACCGGACCGCCATG
AAGCTGCGGCGGCTGCAGAAGGCCCTGTGCCTGGACCTGCTGAGCCTGAGCGCCGCCTGCGACGCCCTGGACCAG
CACAACCTGAAGCAGAACGACCAGCCCATGGACATCCTGCAGATCATCAACTGCCTGACCACCATCTACGACCGG
CTGGAGCAGGAGCACAACAACCTGGTGAACGTGCCCCTGTGCGTGGACATGTGCCTGAACTGGCTGCTGAACGTG
TACGACACCGGCCGGACCGGCCGGATCCGGGTGCTGAGCTTCAAGACCGGCATCATCAGCCTGTGCAAGGCCCAC
CTGGAGGACAAGTACCGGTACCTGTTCAAGCAGGTGGCCAGCAGCACCGGCTTCTGCGACCAGCGGCGGCTGGGC
CTGCTGCTGCACGACAGCATCCAGATCCCCCGGCAGCTGGGCGAGGTGGCCAGCTTCGGCGGCAGCAACATCGAG
CCCAGCGTGCGGAGCTGCTTCCAGTTCGCCAACAACAAGCCCGAGATCGAGGCCGCCCTGTTCCTGGACTGGATG
CGGCTGGAGCCCCAGAGCATGGTGTGGCTGCCCGTGCTGCACCGGGTGGCCGCCGCCGAGACCGCCAAGCACCAG
GCCAAGTGCAACATCTGCAAGGAGTGCCCCATCATCGGCTTCCGGTACCGGAGCCTGAAGCACTTCAACTACGAC
ATCTGCCAGAGCTGCTTCTTCAGCGGCCGGGTGGCCAAGGGCCACAAGATGCACTACCCCATGGTGGAGTACTGC
ACCCCCACCACCAGCGGCGAGGACGTGCGGGACTTCGCCAAGGTGCTGAAGAACAAGTTCCGGACCAAGCGGTAC
TTCGCCAAGCACCCCCGGATGGGCTACCTGCCCGTGCAGACCGTGCTGGAGGGCGACAACATGGAGACCCCCGTG
ACCCTGATCAACTTCTGGCCCGTGGACAGCGCCCCCGCCAGCAGCCCCCAGCTGAGCCACGACGACACCCACAGC
CGGATCGAGCACTACGCCAGCCGGCTGGCCGAGATGGAGAACAGCAACGGCAGCTACCTGAACGACAGCATCAGC
CCCAACGAGAGCATCGACGACGAGCACCTGCTGATCCAGCACTACTGCCAGAGCCTGAACCAGGACAGCCCCCTG
AGCCAGCCCCGGAGC
Utrophin N-terminus through R2_Dystrophin R16-R17_H4 to 1st coiled coil and
proline richregion that follows:
Human sequences without codon alterations:
(SEQ ID NO: 106)
ATGGCCAAGTATGGAGAACATGAAGCCAGTCCTGACAATGGGCAGAACGAATTCAGTGATATCATTAAGTCCAGA
TCTGATGAACACAATGACGTACAGAAGAAAACCTTTACCAAATGGATAAATGCTCGATTTTCAAAGAGTGGGAAA
CCACCCATCAATGATATGTTCACAGACCTCAAAGATGGAAGGAAGCTATTGGATCTTCTAGAAGGCCTCACAGGA
ACATCACTGCCAAAGGAACGTGGTTCCACAAGGGTACATGCCTTAAATAACGTCAACAGAGTGCTGCAGGTTTTA
CATCAGAACAATGTGGAATTAGTGAATATAGGGGGAACTGACATTGTGGATGGAAATCACAAACTGACTTTGGGG
TTACTTTGGAGCATCATTTTGCACTGGCAGGTGAAAGATGTCATGAAGGATGTCATGTCGGACCTGCAGCAGACG
AACAGTGAGAAGATCCTGCTCAGCTGGGTGCGTCAGACCACCAGGCCCTACAGCCAAGTCAACGTCCTCAACTTC
ACCACCAGCTGGACAGATGGACTCGCCTTTAATGCTGTCCTCCACCGACATAAACCTGATCTCTTCAGCTGGGAT
AAAGTTGTCAAAATGTCACCAATTGAGAGACTTGAACATGCCTTCAGCAAGGCTCAAACTTATTTGGGAATTGAA
AAGCTGTTAGATCCTGAAGATGTTGCCGTTCAGCTTCCTGACAAGAAATCCATAATTATGTATTTAACATCTTTG
TTTGAGGTGCTACCTCAGCAAGTCACCATAGACGCCATCCGTGAGGTAGAGACACTCCCAAGGAAATATAAAAAA
GAATGTGAAGAAGAGGCAATTAATATACAGAGTACAGCGCCTGAGGAGGAGCATGAGAGTCCCCGAGCTGAAACT
CCCAGCACTGTCACTGAGGTTGACATGGATCTGGACAGCTATCAGATTGCGTTGGAGGAAGTGCTGACCTGGTTG
CTTTCTGCTGAGGACACTTTCCAGGAGCAGGATGATATTTCTGATGATGTTGAAGAAGTCAAAGACCAGTTTGCA
ACCCATGAAGCTTTTATGATGGAACTGACTGCACACCAGAGCAGTGTGGGCAGCGTCCTGCAGGCAGGCAACCAA
CTGATAACACAAGGAACTCTGTCAGACGAAGAAGAATTTGAGATTCAGGAACAGATGACCCTGCTGAATGCTAGA
TGGGAGGCTCTTAGGGTGGAGAGTATGGACAGACAGTCCCGGCTGCACGATGTGCTGATGGAACTGCAGAAGAAG
CAACTGCAGCAGCTCTCCGCCTGGTTAACACTCACAGAGGAGCGCATTCAGAAGATGGAAACTTGCCCCCTGGAT
GATGATGTAAAATCTCTACAAAAGCTGCTAGAAGAACATAAAAGTTTGCAAAGTGATCTTGAGGCTGAACAGGTG
AAAGTAAATTCACTAACTCACATGGTGGTCATTGTTGATGAAAACAGTGGTGAGAGTGCTACAGCTATCCTAGAA
GACCAGTTACAGAAACTTGGTGAGCGCTGGACAGCAGTATGCCGTTGGACTGAAGAACGCTGGAATAGGTTACAA
GAAATCGCCGCTAGCGCCATGATGGTGATGACTGAAGACATGCCTTTGGAAATTTCTTATGTGCCTTCTACTTAT
TTGACTGAAATCACTCATGTCTCACAAGCCCTATTAGAAGTGGAACAACTTCTCAATGCTCCTGACCTCTGTGCT
AAGGACTTTGAAGATCTCTTTAAGCAAGAGGAGTCTCTGAAGAATATAAAAGATAGTCTACAACAAAGCTCAGGT
CGGATTGACATTATTCATAGCAAGAAGACAGCAGCATTGCAAAGTGCAACGCCTGTGGAAAGGGTGAAGCTACAG
GAAGCTCTCTCCCAGCTTGATTTCCAATGGGAAAAAGTTAACAAAATGTACAAGGACCGACAAGGGCGATTTGAC
AGATCTGTTGAGAAATGGCGGCGTTTTCATTATGATATAAAGATATTTAATCAGTGGCTAACAGAAGCTGAACAG
TTTCTCAGAAAGACACAAATTCCTGAGAATTGGGAACATGCTAAATACAAATGGTATCTTAAGGAACTCCAGGAT
GGCATTGGGCAGCGGCAAACTGTTGTCAGAACATTGAATGCAACTGGGGAAGAAATAATTCAGCAATCCTCAAAA
ACAGATGCCAGTATTCTACAGGAAAAATTGGGAAGCCTGAATCTGCGGTGGCAGGAGGTCTGCAAACAGCTGTCA
GACAGAAAAAAGAGGCTAGAAGAACAAAAGGGTCCAGCATCTCAGCACTTTCTTTCCACGTCTGTCCAGGGTCCC
TGGGAGAGAGCCATCTCGCCAAACAAAGTGCCCTACTATATCAACCACGAGACTCAAACAACTTGCTGGGACCAT
CCCAAAATGACAGAGCTCTACCAGTCTTTAGCTGACCTGAATAATGTCAGATTCTCAGCTTATAGGACTGCCATG
AAACTCCGAAGACTGCAGAAGGCCCTTTGCTTGGATCTCTTGAGCCTGTCAGCTGCATGTGATGCCTTGGACCAG
CACAACCTCAAGCAAAATGACCAGCCCATGGATATCCTGCAGATTATTAATTGTTTGACCACTATTTATGACCGC
CTGGAGCAAGAGCACAACAATTTGGTCAACGTCCCTCTCTGCGTGGATATGTGTCTGAACTGGCTGCTGAATGTT
TATGATACGGGACGAACAGGGAGGATCCGTGTCCTGTCTTTTAAAACTGGCATCATTTCCCTGTGTAAAGCACAT
TTGGAAGACAAGTACAGATACCTTTTCAAGCAAGTGGCAAGTTCAACAGGATTTTGTGACCAGCGCAGGCTGGGC
CTCCTTCTGCATGATTCTATCCAAATTCCAAGACAGTTGGGTGAAGTTGCATCCTTTGGGGGCAGTAACATTGAG
CCAAGTGTCCGGAGCTGCTTCCAATTTGCTAATAATAAGCCAGAGATCGAAGCGGCCCTCTTCCTAGACTGGATG
AGACTGGAACCCCAGTCCATGGTGTGGCTGCCCGTCCTGCACAGAGTGGCTGCTGCAGAAACTGCCAAGCATCAG
GCCAAATGTAACATCTGCAAAGAGTGTCCAATCATTGGATTCAGGTACAGGAGTCTAAAGCACTTTAATTATGAC
ATCTGCCAAAGCTGCTTTTTTTCTGGTCGAGTTGCAAAAGGCCATAAAATGCACTATCCCATGGTGGAATATTGC
ACTCCGACTACATCAGGAGAAGATGTTCGAGACTTTGCCAAGGTACTAAAAAACAAATTTCGAACCAAAAGGTAT
TTTGCGAAGCATCCCCGAATGGGCTACCTGCCAGTGCAGACTGTCTTAGAGGGGGACAACATGGAAACTCCCGTT
ACTCTGATCAACTTCTGGCCAGTAGATTCTGCGCCTGCCTCGTCCCCTCAGCTTTCACACGATGATACTCATTCA
CGCATTGAACATTATGCTAGCAGGCTAGCAGAAATGGAAAACAGCAATGGATCTTATCTAAATGATAGCATCTCT
CCTAATGAGAGCATAGATGATGAACATTTGTTAATCCAGCATTACTGCCAAAGTTTGAACCAGGACTCCCCCCTG
AGCCAGCCTCGTAGTCCTGCCCAGATCTTGATTTCCTTAGAGAGTGAGGAAAGAGGGGAGCTAGAGAGAATCCTA
GCAGATCTTGAGGAAGAAAACAGGAATCTGCAAGCAGAATATGACCGTCTAAAGCAGCAGCACGAACATAAAGGC
CTGTCCCCACTGCCGTCCCCTCCTGAAATGATGCCCACCTCTCCCCAGAGTCCC
Human sequences with codon optimization:
(SEQ ID NO: 107)
ATGGCCAAGTACGGCGAGCACGAGGCCAGCCCCGACAACGGCCAGAACGAGTTCAGCGACATCATCAAGAGCCGG
AGCGACGAGCACAACGACGTGCAGAAGAAGACCTTCACCAAGTGGATCAACGCCCGGTTCAGCAAGAGCGGCAAG
CCCCCCATCAACGACATGTTCACCGACCTGAAGGACGGCCGGAAGCTGCTGGACCTGCTGGAGGGCCTGACCGGC
ACCAGCCTGCCCAAGGAGCGGGGCAGCACCCGGGTGCACGCCCTGAACAACGTGAACCGGGTGCTGCAGGTGCTG
CACCAGAACAACGTGGAGCTGGTGAACATCGGCGGCACCGACATCGTGGACGGCAACCACAAGCTGACCCTGGGC
CTGCTGTGGAGCATCATCCTGCACTGGCAGGTGAAGGACGTGATGAAGGACGTGATGAGCGACCTGCAGCAGACC
AACAGCGAGAAGATCCTGCTGAGCTGGGTGCGGCAGACCACCCGGCCCTACAGCCAGGTGAACGTGCTGAACTTC
ACCACCAGCTGGACCGACGGCCTGGCCTTCAACGCCGTGCTGCACCGGCACAAGCCCGACCTGTTCAGCTGGGAC
AAGGTGGTGAAGATGAGCCCCATCGAGCGGCTGGAGCACGCCTTCAGCAAGGCCCAGACCTACCTGGGCATCGAG
AAGCTGCTGGACCCCGAGGACGTGGCCGTGCAGCTGCCCGACAAGAAGAGCATCATCATGTACCTGACCAGCCTG
TTCGAGGTGCTGCCCCAGCAGGTGACCATCGACGCCATCCGGGAGGTGGAGACCCTGCCCCGGAAGTACAAGAAG
GAGTGCGAGGAGGAGGCCATCAACATCCAGAGCACCGCCCCCGAGGAGGAGCACGAGAGCCCCCGGGCCGAGACC
CCCAGCACCGTGACCGAGGTGGACATGGACCTGGACAGCTACCAGATCGCCCTGGAGGAGGTGCTGACCTGGCTG
CTGAGCGCCGAGGACACCTTCCAGGAGCAGGACGACATCAGCGACGACGTGGAGGAGGTGAAGGACCAGTTCGCC
ACCCACGAGGCCTTCATGATGGAGCTGACCGCCCACCAGAGCAGCGTGGGCAGCGTGCTGCAGGCCGGCAACCAG
CTGATCACCCAGGGCACCCTGAGCGACGAGGAGGAGTTCGAGATCCAGGAGCAGATGACCCTGCTGAACGCCCGG
TGGGAGGCCCTGCGGGTGGAGAGCATGGACCGGCAGAGCCGGCTGCACGACGTGCTGATGGAGCTGCAGAAGAAG
CAGCTGCAGCAGCTGAGCGCCTGGCTGACCCTGACCGAGGAGCGGATCCAGAAGATGGAGACCTGCCCCCTGGAC
GACGACGTGAAGAGCCTGCAGAAGCTGCTGGAGGAGCACAAGAGCCTGCAGAGCGACCTGGAGGCCGAGCAGGTG
AAGGTGAACAGCCTGACCCACATGGTGGTGATCGTGGACGAGAACAGCGGCGAGAGCGCCACCGCCATCCTGGAG
GACCAGCTGCAGAAGCTGGGCGAGCGGTGGACCGCCGTGTGCCGGTGGACCGAGGAGCGGTGGAACCGGCTGCAG
GAGATCGCCGCTAGCGCCATGATGGTGATGACCGAGGACATGCCCCTGGAGATCAGCTACGTGCCCAGCACCTAC
CTGACCGAGATCACCCACGTGAGCCAGGCCCTGCTGGAGGTGGAGCAGCTGCTGAACGCCCCCGACCTGTGCGCC
AAGGACTTCGAGGACCTGTTCAAGCAGGAGGAGAGCCTGAAGAACATCAAGGACAGCCTGCAGCAGAGCAGCGGC
CGGATCGACATCATCCACAGCAAGAAGACCGCCGCCCTGCAGAGCGCCACCCCCGTGGAGCGGGTGAAGCTGCAG
GAGGCCCTGAGCCAGCTGGACTTCCAGTGGGAGAAGGTGAACAAGATGTACAAGGACCGGCAGGGCCGGTTCGAC
CGGAGCGTGGAGAAGTGGCGGCGGTTCCACTACGACATCAAGATCTTCAACCAGTGGCTGACCGAGGCCGAGCAG
TTCCTGCGGAAGACCCAGATCCCCGAGAACTGGGAGCACGCCAAGTACAAGTGGTACCTGAAGGAGCTGCAGGAC
GGCATCGGCCAGCGGCAGACCGTGGTGCGGACCCTGAACGCCACCGGCGAGGAGATCATCCAGCAGAGCAGCAAG
ACCGACGCCAGCATCCTGCAGGAGAAGCTGGGCAGCCTGAACCTGCGGTGGCAGGAGGTGTGCAAGCAGCTGAGC
GACCGGAAGAAGCGGCTGGAGGAGCAGAAGGGCCCCGCCAGCCAGCACTTCCTGAGCACCAGCGTGCAGGGCCCC
TGGGAGCGGGCCATCAGCCCCAACAAGGTGCCCTACTACATCAACCACGAGACCCAGACCACCTGCTGGGACCAC
CCCAAGATGACCGAGCTGTACCAGAGCCTGGCCGACCTGAACAACGTGCGGTTCAGCGCCTACCGGACCGCCATG
AAGCTGCGGCGGCTGCAGAAGGCCCTGTGCCTGGACCTGCTGAGCCTGAGCGCCGCCTGCGACGCCCTGGACCAG
CACAACCTGAAGCAGAACGACCAGCCCATGGACATCCTGCAGATCATCAACTGCCTGACCACCATCTACGACCGG
CTGGAGCAGGAGCACAACAACCTGGTGAACGTGCCCCTGTGCGTGGACATGTGCCTGAACTGGCTGCTGAACGTG
TACGACACCGGCCGGACCGGCCGGATCCGGGTGCTGAGCTTCAAGACCGGCATCATCAGCCTGTGCAAGGCCCAC
CTGGAGGACAAGTACCGGTACCTGTTCAAGCAGGTGGCCAGCAGCACCGGCTTCTGCGACCAGCGGCGGCTGGGC
CTGCTGCTGCACGACAGCATCCAGATCCCCCGGCAGCTGGGCGAGGTGGCCAGCTTCGGCGGCAGCAACATCGAG
CCCAGCGTGCGGAGCTGCTTCCAGTTCGCCAACAACAAGCCCGAGATCGAGGCCGCCCTGTTCCTGGACTGGATG
CGGCTGGAGCCCCAGAGCATGGTGTGGCTGCCCGTGCTGCACCGGGTGGCCGCCGCCGAGACCGCCAAGCACCAG
GCCAAGTGCAACATCTGCAAGGAGTGCCCCATCATCGGCTTCCGGTACCGGAGCCTGAAGCACTTCAACTACGAC
ATCTGCCAGAGCTGCTTCTTCAGCGGCCGGGTGGCCAAGGGCCACAAGATGCACTACCCCATGGTGGAGTACTGC
ACCCCCACCACCAGCGGCGAGGACGTGCGGGACTTCGCCAAGGTGCTGAAGAACAAGTTCCGGACCAAGCGGTAC
TTCGCCAAGCACCCCCGGATGGGCTACCTGCCCGTGCAGACCGTGCTGGAGGGCGACAACATGGAGACCCCCGTG
ACCCTGATCAACTTCTGGCCCGTGGACAGCGCCCCCGCCAGCAGCCCCCAGCTGAGCCACGACGACACCCACAGC
CGGATCGAGCACTACGCCAGCCGGCTGGCCGAGATGGAGAACAGCAACGGCAGCTACCTGAACGACAGCATCAGC
CCCAACGAGAGCATCGACGACGAGCACCTGCTGATCCAGCACTACTGCCAGAGCCTGAACCAGGACAGCCCCCTG
AGCCAGCCCCGGAGCCCCGCCCAGATCCTGATCAGCCTGGAGAGCGAGGAGCGGGGCGAGCTGGAGCGGATCCTG
GCCGACCTGGAGGAGGAGAACCGGAACCTGCAGGCCGAGTACGACCGGCTGAAGCAGCAGCACGAGCACAAGGGC
CTGAGCCCCCTGCCCAGCCCCCCCGAGATGATGCCCACCAGCCCCCAGAGCCCC
Utrophin N-terminus through R1_Dystrophin R16-R17_R23 to end of syntrophin region:
Human sequences without codon alterations:
(SEQ ID NO: 108)
ATGGCCAAGTATGGAGAACATGAAGCCAGTCCTGACAATGGGCAGAACGAATTCAGTGATATCATTAAGTCCAGA
TCTGATGAACACAATGACGTACAGAAGAAAACCTTTACCAAATGGATAAATGCTCGATTTTCAAAGAGTGGGAAA
CCACCCATCAATGATATGTTCACAGACCTCAAAGATGGAAGGAAGCTATTGGATCTTCTAGAAGGCCTCACAGGA
ACATCACTGCCAAAGGAACGTGGTTCCACAAGGGTACATGCCTTAAATAACGTCAACAGAGTGCTGCAGGTTTTA
CATCAGAACAATGTGGAATTAGTGAATATAGGGGGAACTGACATTGTGGATGGAAATCACAAACTGACTTTGGGG
TTACTTTGGAGCATCATTTTGCACTGGCAGGTGAAAGATGTCATGAAGGATGTCATGTCGGACCTGCAGCAGACG
AACAGTGAGAAGATCCTGCTCAGCTGGGTGCGTCAGACCACCAGGCCCTACAGCCAAGTCAACGTCCTCAACTTC
ACCACCAGCTGGACAGATGGACTCGCCTTTAATGCTGTCCTCCACCGACATAAACCTGATCTCTTCAGCTGGGAT
AAAGTTGTCAAAATGTCACCAATTGAGAGACTTGAACATGCCTTCAGCAAGGCTCAAACTTATTTGGGAATTGAA
AAGCTGTTAGATCCTGAAGATGTTGCCGTTCAGCTTCCTGACAAGAAATCCATAATTATGTATTTAACATCTTTG
TTTGAGGTGCTACCTCAGCAAGTCACCATAGACGCCATCCGTGAGGTAGAGACACTCCCAAGGAAATATAAAAAA
GAATGTGAAGAAGAGGCAATTAATATACAGAGTACAGCGCCTGAGGAGGAGCATGAGAGTCCCCGAGCTGAAACT
CCCAGCACTGTCACTGAGGTTGACATGGATCTGGACAGCTATCAGATTGCGTTGGAGGAAGTGCTGACCTGGTTG
CTTTCTGCTGAGGACACTTTCCAGGAGCAGGATGATATTTCTGATGATGTTGAAGAAGTCAAAGACCAGTTTGCA
ACCCATGAAGCTTTTATGATGGAACTGACTGCACACCAGAGCAGTGTGGGCAGCGTCCTGCAGGCAGGCAACCAA
CTGATAACACAAGGAACTCTGTCAGACGAAGAAGAATTTGAGATTCAGGAACAGATGACCCTGCTGAATGCTAGA
TGGGAGGCTCTTAGGGTGGAGAGTATGGACAGACAGTCCCGGCTGCACGATGTGCTGATGGCCGCTAGCGCCATG
ATGGTGATGACTGAAGACATGCCTTTGGAAATTTCTTATGTGCCTTCTACTTATTTGACTGAAATCACTCATGTC
TCACAAGCCCTATTAGAAGTGGAACAACTTCTCAATGCTCCTGACCTCTGTGCTAAGGACTTTGAAGATCTCTTT
AAGCAAGAGGAGTCTCTGAAGAATATAAAAGATAGTCTACAACAAAGCTCAGGTCGGATTGACATTATTCATAGC
AAGAAGACAGCAGCATTGCAAAGTGCAACGCCTGTGGAAAGGGTGAAGCTACAGGAAGCTCTCTCCCAGCTTGAT
TTCCAATGGGAAAAAGTTAACAAAATGTACAAGGACCGACAAGGGCGATTTGACAGATCTGTTGAGAAATGGCGG
CGTTTTCATTATGATATAAAGATATTTAATCAGTGGCTAACAGAAGCTGAACAGTTTCTCAGAAAGACACAAATT
CCTGAGAATTGGGAACATGCTAAATACAAATGGTATCTTAAGGAACTCCAGGATGGCATTGGGCAGCGGCAAACT
GTTGTCAGAACATTGAATGCAACTGGGGAAGAAATAATTCAGCAATCCTCAAAAACAGATGCCAGTATTCTACAG
GAAAAATTGGGAAGCCTGAATCTGCGGTGGCAGGAGGTCTGCAAACAGCTGTCAGACAGAAAAAAGAGGCTAGAA
GAACAAAAGAGTTCTGACCAGTGGAAGCGTCTGCACCTTTCTCTGCAGGAACTTCTGGTGTGGCTACAGCTGAAA
GATGATGAATTAAGCCGGCAGGCACCTATTGGAGGCGACTTTCCAGCAGTTCAGAAGCAGAACGATGTACATAGG
GCCTTCAAGAGGGAATTGAAAACTAAAGAACCTGTAATCATGAGTACTCTTGAGACTGTACGAATATTTCTGACA
GAGCAGCCTTTGGAAGGACTAGAGAAACTCTACCAGGAGCCCAGAGAGCTGCCTCCTGAGGAGAGAGCCCAGAAT
GTCACTCGGCTTCTACGAAAGCAGGCTGAGGAGGTCAATACTGAGTGGGAAAAATTGAACCTGCACTCCGCTGAC
TGGCAGAGAAAAATAGATGAGACCCTTGAAAGACTCCGGGAACTTCAAGAGGCCACGGATGAGCTGGACCTCAAG
CTGCGCCAAGCTGAGGTGATCAAGGGATCCTGGCAGCCCGTGGGCGATCTCCTCATTGACTCTCTCCAAGATCAC
CTCGAGAAAGTCAAGGCACTTCGAGGAGAAATTGCGCCTCTGAAAGAGAACGTGAGCCACGTCAATGACCTTGCT
CGCCAGCTTACCACTTTGGGCATTCAGCTCTCACCGTATAACCTCAGCACTCTGGAAGACCTGAACACCAGATGG
AAGCTTCTGCAGGTGGCCGTCGAGGACCGAGTCAGGCAGCTGCATGAAGCCCACAGGGACTTTGGTCCAGCATCT
CAGCACTTTCTTTCCACGTCTGTCCAGGGTCCCTGGGAGAGAGCCATCTCGCCAAACAAAGTGCCCTACTATATC
AACCACGAGACTCAAACAACTTGCTGGGACCATCCCAAAATGACAGAGCTCTACCAGTCTTTAGCTGACCTGAAT
AATGTCAGATTCTCAGCTTATAGGACTGCCATGAAACTCCGAAGACTGCAGAAGGCCCTTTGCTTGGATCTCTTG
AGCCTGTCAGCTGCATGTGATGCCTTGGACCAGCACAACCTCAAGCAAAATGACCAGCCCATGGATATCCTGCAG
ATTATTAATTGTTTGACCACTATTTATGACCGCCTGGAGCAAGAGCACAACAATTTGGTCAACGTCCCTCTCTGC
GTGGATATGTGTCTGAACTGGCTGCTGAATGTTTATGATACGGGACGAACAGGGAGGATCCGTGTCCTGTCTTTT
AAAACTGGCATCATTTCCCTGTGTAAAGCACATTTGGAAGACAAGTACAGATACCTTTTCAAGCAAGTGGCAAGT
TCAACAGGATTTTGTGACCAGCGCAGGCTGGGCCTCCTTCTGCATGATTCTATCCAAATTCCAAGACAGTTGGGT
GAAGTTGCATCCTTTGGGGGCAGTAACATTGAGCCAAGTGTCCGGAGCTGCTTCCAATTTGCTAATAATAAGCCA
GAGATCGAAGCGGCCCTCTTCCTAGACTGGATGAGACTGGAACCCCAGTCCATGGTGTGGCTGCCCGTCCTGCAC
AGAGTGGCTGCTGCAGAAACTGCCAAGCATCAGGCCAAATGTAACATCTGCAAAGAGTGTCCAATCATTGGATTC
AGGTACAGGAGTCTAAAGCACTTTAATTATGACATCTGCCAAAGCTGCTTTTTTTCTGGTCGAGTTGCAAAAGGC
CATAAAATGCACTATCCCATGGTGGAATATTGCACTCCGACTACATCAGGAGAAGATGTTCGAGACTTTGCCAAG
GTACTAAAAAACAAATTTCGAACCAAAAGGTATTTTGCGAAGCATCCCCGAATGGGCTACCTGCCAGTGCAGACT
GTCTTAGAGGGGGACAACATGGAAACTCCCGTTACTCTGATCAACTTCTGGCCAGTAGATTCTGCGCCTGCCTCG
TCCCCTCAGCTTTCACACGATGATACTCATTCACGCATTGAACATTATGCTAGCAGGCTAGCAGAAATGGAAAAC
AGCAATGGATCTTATCTAAATGATAGCATCTCTCCTAATGAGAGCATAGATGATGAACATTTGTTAATCCAGCAT
TACTGCCAAAGTTTGAACCAGGACTCCCCCCTGAGCCAGCCTCGTAGT
Human sequences with codon optimization:
(SEQ ID NO: 109)
ATGGCCAAGTACGGCGAGCACGAGGCCAGCCCCGACAACGGCCAGAACGAGTTCAGCGACATCATCAAGAGCCGG
AGCGACGAGCACAACGACGTGCAGAAGAAGACCTTCACCAAGTGGATCAACGCCCGGTTCAGCAAGAGCGGCAAG
CCCCCCATCAACGACATGTTCACCGACCTGAAGGACGGCCGGAAGCTGCTGGACCTGCTGGAGGGCCTGACCGGC
ACCAGCCTGCCCAAGGAGCGGGGCAGCACCCGGGTGCACGCCCTGAACAACGTGAACCGGGTGCTGCAGGTGCTG
CACCAGAACAACGTGGAGCTGGTGAACATCGGCGGCACCGACATCGTGGACGGCAACCACAAGCTGACCCTGGGC
CTGCTGTGGAGCATCATCCTGCACTGGCAGGTGAAGGACGTGATGAAGGACGTGATGAGCGACCTGCAGCAGACC
AACAGCGAGAAGATCCTGCTGAGCTGGGTGCGGCAGACCACCCGGCCCTACAGCCAGGTGAACGTGCTGAACTTC
ACCACCAGCTGGACCGACGGCCTGGCCTTCAACGCCGTGCTGCACCGGCACAAGCCCGACCTGTTCAGCTGGGAC
AAGGTGGTGAAGATGAGCCCCATCGAGCGGCTGGAGCACGCCTTCAGCAAGGCCCAGACCTACCTGGGCATCGAG
AAGCTGCTGGACCCCGAGGACGTGGCCGTGCAGCTGCCCGACAAGAAGAGCATCATCATGTACCTGACCAGCCTG
TTCGAGGTGCTGCCCCAGCAGGTGACCATCGACGCCATCCGGGAGGTGGAGACCCTGCCCCGGAAGTACAAGAAG
GAGTGCGAGGAGGAGGCCATCAACATCCAGAGCACCGCCCCCGAGGAGGAGCACGAGAGCCCCCGGGCCGAGACC
CCCAGCACCGTGACCGAGGTGGACATGGACCTGGACAGCTACCAGATCGCCCTGGAGGAGGTGCTGACCTGGCTG
CTGAGCGCCGAGGACACCTTCCAGGAGCAGGACGACATCAGCGACGACGTGGAGGAGGTGAAGGACCAGTTCGCC
ACCCACGAGGCCTTCATGATGGAGCTGACCGCCCACCAGAGCAGCGTGGGCAGCGTGCTGCAGGCCGGCAACCAG
CTGATCACCCAGGGCACCCTGAGCGACGAGGAGGAGTTCGAGATCCAGGAGCAGATGACCCTGCTGAACGCCCGG
TGGGAGGCCCTGCGGGTGGAGAGCATGGACCGGCAGAGCCGGCTGCACGACGTGCTGATGGCCGCTAGCGCCATG
ATGGTGATGACCGAGGACATGCCCCTGGAGATCAGCTACGTGCCCAGCACCTACCTGACCGAGATCACCCACGTG
AGCCAGGCCCTGCTGGAGGTGGAGCAGCTGCTGAACGCCCCCGACCTGTGCGCCAAGGACTTCGAGGACCTGTTC
AAGCAGGAGGAGAGCCTGAAGAACATCAAGGACAGCCTGCAGCAGAGCAGCGGCCGGATCGACATCATCCACAGC
AAGAAGACCGCCGCCCTGCAGAGCGCCACCCCCGTGGAGCGGGTGAAGCTGCAGGAGGCCCTGAGCCAGCTGGAC
TTCCAGTGGGAGAAGGTGAACAAGATGTACAAGGACCGGCAGGGCCGGTTCGACCGGAGCGTGGAGAAGTGGCGG
CGGTTCCACTACGACATCAAGATCTTCAACCAGTGGCTGACCGAGGCCGAGCAGTTCCTGCGGAAGACCCAGATC
CCCGAGAACTGGGAGCACGCCAAGTACAAGTGGTACCTGAAGGAGCTGCAGGACGGCATCGGCCAGCGGCAGACC
GTGGTGCGGACCCTGAACGCCACCGGCGAGGAGATCATCCAGCAGAGCAGCAAGACCGACGCCAGCATCCTGCAG
GAGAAGCTGGGCAGCCTGAACCTGCGGTGGCAGGAGGTGTGCAAGCAGCTGAGCGACCGGAAGAAGCGGCTGGAG
GAGCAGAAGAGCAGCGACCAGTGGAAGCGGCTGCACCTGAGCCTGCAGGAGCTGCTGGTGTGGCTGCAGCTGAAG
GACGACGAGCTGAGCCGGCAGGCCCCCATCGGCGGCGACTTCCCCGCCGTGCAGAAGCAGAACGACGTGCACCGG
GCCTTCAAGCGGGAGCTGAAGACCAAGGAGCCCGTGATCATGAGCACCCTGGAGACCGTGCGGATCTTCCTGACC
GAGCAGCCCCTGGAGGGCCTGGAGAAGCTGTACCAGGAGCCCCGGGAGCTGCCCCCCGAGGAGCGGGCCCAGAAC
GTGACCCGGCTGCTGCGGAAGCAGGCCGAGGAGGTGAACACCGAGTGGGAGAAGCTGAACCTGCACAGCGCCGAC
TGGCAGCGGAAGATCGACGAGACCCTGGAGCGGCTGCAGGAGCTGCAGGAGGCCACCGACGAGCTGGACCTGAAG
CTGCGGCAGGCCGAGGTGATCAAGGGCAGCTGGCAGCCCGTGGGCGACCTGCTGATCGACAGCCTGCAGGACCAC
CTGGAGAAGGTGAAGGCCCTGCGGGGCGAGATCGCCCCCCTGAAGGAGAACGTGAGCCACGTGAACGACCTGGCC
CGGCAGCTGACCACCCTGGGCATCCAGCTGAGCCCCTACAACCTGAGCACCCTGGAGGACCTGAACACCCGGTGG
AAGCTGCTGCAGGTGGCCGTGGAGGACCGGGTGCGGCAGCTGCACGAGGCCCACCGGGACTTCGGCCCCGCCAGC
CAGCACTTCCTGAGCACCAGCGTGCAGGGCCCCTGGGAGCGGGCCATCAGCCCCAACAAGGTGCCCTACTACATC
AACCACGAGACCCAGACCACCTGCTGGGACCACCCCAAGATGACCGAGCTGTACCAGAGCCTGGCCGACCTGAAC
AACGTGCGGTTCAGCGCCTACCGGACCGCCATGAAGCTGCGGCGGCTGCAGAAGGCCCTGTGCCTGGACCTGCTG
AGCCTGAGCGCCGCCTGCGACGCCCTGGACCAGCACAACCTGAAGCAGAACGACCAGCCCATGGACATCCTGCAG
ATCATCAACTGCCTGACCACCATCTACGACCGGCTGGAGCAGGAGCACAACAACCTGGTGAACGTGCCCCTGTGC
GTGGACATGTGCCTGAACTGGCTGCTGAACGTGTACGACACCGGCCGGACCGGCCGGATCCGGGTGCTGAGCTTC
AAGACCGGCATCATCAGCCTGTGCAAGGCCCACCTGGAGGACAAGTACCGGTACCTGTTCAAGCAGGTGGCCAGC
AGCACCGGCTTCTGCGACCAGCGGCGGCTGGGCCTGCTGCTGCACGACAGCATCCAGATCCCCCGGCAGCTGGGC
GAGGTGGCCAGCTTCGGCGGCAGCAACATCGAGCCCAGCGTGCGGAGCTGCTTCCAGTTCGCCAACAACAAGCCC
GAGATCGAGGCCGCCCTGTTCCTGGACTGGATGCGGCTGGAGCCCCAGAGCATGGTGTGGCTGCCCGTGCTGCAC
CGGGTGGCCGCCGCCGAGACCGCCAAGCACCAGGCCAAGTGCAACATCTGCAAGGAGTGCCCCATCATCGGCTTC
CGGTACCGGAGCCTGAAGCACTTCAACTACGACATCTGCCAGAGCTGCTTCTTCAGCGGCCGGGTGGCCAAGGGC
CACAAGATGCACTACCCCATGGTGGAGTACTGCACCCCCACCACCAGCGGCGAGGACGTGCGGGACTTCGCCAAG
GTGCTGAAGAACAAGTTCCGGACCAAGCGGTACTTCGCCAAGCACCCCCGGATGGGCTACCTGCCCGTGCAGACC
GTGCTGGAGGGCGACAACATGGAGACCCCCGTGACCCTGATCAACTTCTGGCCCGTGGACAGCGCCCCCGCCAGC
AGCCCCCAGCTGAGCCACGACGACACCCACAGCCGGATCGAGCACTACGCCAGCCGGCTGGCCGAGATGGAGAAC
AGCAACGGCAGCTACCTGAACGACAGCATCAGCCCCAACGAGAGCATCGACGACGAGCACCTGCTGATCCAGCAC
TACTGCCAGAGCCTGAACCAGGACAGCCCCCTGAGCCAGCCCCGGAGC
Utrophin N-terminus through R2_Dystrophin R16-R17_R24 + H4 to end of syntrophin
region:
Human sequences without codon alterations:
(SEQ ID NO: 110)
ATGGCCAAGTATGGAGAACATGAAGCCAGTCCTGACAATGGGCAGAACGAATTCAGTGATATCATTAAGTCCAGA
TCTGATGAACACAATGACGTACAGAAGAAAACCTTTACCAAATGGATAAATGCTCGATTTTCAAAGAGTGGGAAA
CCACCCATCAATGATATGTTCACAGACCTCAAAGATGGAAGGAAGCTATTGGATCTTCTAGAAGGCCTCACAGGA
ACATCACTGCCAAAGGAACGTGGTTCCACAAGGGTACATGCCTTAAATAACGTCAACAGAGTGCTGCAGGTTTTA
CATCAGAACAATGTGGAATTAGTGAATATAGGGGGAACTGACATTGTGGATGGAAATCACAAACTGACTTTGGGG
TTACTTTGGAGCATCATTTTGCACTGGCAGGTGAAAGATGTCATGAAGGATGTCATGTCGGACCTGCAGCAGACG
AACAGTGAGAAGATCCTGCTCAGCTGGGTGCGTCAGACCACCAGGCCCTACAGCCAAGTCAACGTCCTCAACTTC
ACCACCAGCTGGACAGATGGACTCGCCTTTAATGCTGTCCTCCACCGACATAAACCTGATCTCTTCAGCTGGGAT
AAAGTTGTCAAAATGTCACCAATTGAGAGACTTGAACATGCCTTCAGCAAGGCTCAAACTTATTTGGGAATTGAA
AAGCTGTTAGATCCTGAAGATGTTGCCGTTCAGCTTCCTGACAAGAAATCCATAATTATGTATTTAACATCTTTG
TTTGAGGTGCTACCTCAGCAAGTCACCATAGACGCCATCCGTGAGGTAGAGACACTCCCAAGGAAATATAAAAAA
GAATGTGAAGAAGAGGCAATTAATATACAGAGTACAGCGCCTGAGGAGGAGCATGAGAGTCCCCGAGCTGAAACT
CCCAGCACTGTCACTGAGGTTGACATGGATCTGGACAGCTATCAGATTGCGTTGGAGGAAGTGCTGACCTGGTTG
CTTTCTGCTGAGGACACTTTCCAGGAGCAGGATGATATTTCTGATGATGTTGAAGAAGTCAAAGACCAGTTTGCA
ACCCATGAAGCTTTTATGATGGAACTGACTGCACACCAGAGCAGTGTGGGCAGCGTCCTGCAGGCAGGCAACCAA
CTGATAACACAAGGAACTCTGTCAGACGAAGAAGAATTTGAGATTCAGGAACAGATGACCCTGCTGAATGCTAGA
TGGGAGGCTCTTAGGGTGGAGAGTATGGACAGACAGTCCCGGCTGCACGATGTGCTGATGGAACTGCAGAAGAAG
CAACTGCAGCAGCTCTCCGCCTGGTTAACACTCACAGAGGAGCGCATTCAGAAGATGGAAACTTGCCCCCTGGAT
GATGATGTAAAATCTCTACAAAAGCTGCTAGAAGAACATAAAAGTTTGCAAAGTGATCTTGAGGCTGAACAGGTG
AAAGTAAATTCACTAACTCACATGGTGGTCATTGTTGATGAAAACAGTGGTGAGAGTGCTACAGCTATCCTAGAA
GACCAGTTACAGAAACTTGGTGAGCGCTGGACAGCAGTATGCCGTTGGACTGAAGAACGCTGGAATAGGTTACAA
GAAATCGCCGCTAGCGCCATGATGGTGATGACTGAAGACATGCCTTTGGAAATTTCTTATGTGCCTTCTACTTAT
TTGACTGAAATCACTCATGTCTCACAAGCCCTATTAGAAGTGGAACAACTTCTCAATGCTCCTGACCTCTGTGCT
AAGGACTTTGAAGATCTCTTTAAGCAAGAGGAGTCTCTGAAGAATATAAAAGATAGTCTACAACAAAGCTCAGGT
CGGATTGACATTATTCATAGCAAGAAGACAGCAGCATTGCAAAGTGCAACGCCTGTGGAAAGGGTGAAGCTACAG
GAAGCTCTCTCCCAGCTTGATTTCCAATGGGAAAAAGTTAACAAAATGTACAAGGACCGACAAGGGCGATTTGAC
AGATCTGTTGAGAAATGGCGGCGTTTTCATTATGATATAAAGATATTTAATCAGTGGCTAACAGAAGCTGAACAG
TTTCTCAGAAAGACACAAATTCCTGAGAATTGGGAACATGCTAAATACAAATGGTATCTTAAGGAACTCCAGGAT
GGCATTGGGCAGCGGCAAACTGTTGTCAGAACATTGAATGCAACTGGGGAAGAAATAATTCAGCAATCCTCAAAA
ACAGATGCCAGTATTCTACAGGAAAAATTGGGAAGCCTGAATCTGCGGTGGCAGGAGGTCTGCAAACAGCTGTCA
GACAGAAAAAAGAGGCTAGAAGAACAAAAGTGGCAGAGAAAAATAGATGAGACCCTTGAAAGACTCCGGGAACTT
CAAGAGGCCACGGATGAGCTGGACCTCAAGCTGCGCCAAGCTGAGGTGATCAAGGGATCCTGGCAGCCCGTGGGC
GATCTCCTCATTGACTCTCTCCAAGATCACCTCGAGAAAGTCAAGGCACTTCGAGGAGAAATTGCGCCTCTGAAA
GAGAACGTGAGCCACGTCAATGACCTTGCTCGCCAGCTTACCACTTTGGGCATTCAGCTCTCACCGTATAACCTC
AGCACTCTGGAAGACCTGAACACCAGATGGAAGCTTCTGCAGGTGGCCGTCGAGGACCGAGTCAGGCAGCTGCAT
GAAGCCCACAGGGACTTTGGTCCAGCATCTCAGCACTTTCTTTCCACGTCTGTCCAGGGTCCCTGGGAGAGAGCC
ATCTCGCCAAACAAAGTGCCCTACTATATCAACCACGAGACTCAAACAACTTGCTGGGACCATCCCAAAATGACA
GAGCTCTACCAGTCTTTAGCTGACCTGAATAATGTCAGATTCTCAGCTTATAGGACTGCCATGAAACTCCGAAGA
CTGCAGAAGGCCCTTTGCTTGGATCTCTTGAGCCTGTCAGCTGCATGTGATGCCTTGGACCAGCACAACCTCAAG
CAAAATGACCAGCCCATGGATATCCTGCAGATTATTAATTGTTTGACCACTATTTATGACCGCCTGGAGCAAGAG
CACAACAATTTGGTCAACGTCCCTCTCTGCGTGGATATGTGTCTGAACTGGCTGCTGAATGTTTATGATACGGGA
CGAACAGGGAGGATCCGTGTCCTGTCTTTTAAAACTGGCATCATTTCCCTGTGTAAAGCACATTTGGAAGACAAG
TACAGATACCTTTTCAAGCAAGTGGCAAGTTCAACAGGATTTTGTGACCAGCGCAGGCTGGGCCTCCTTCTGCAT
GATTCTATCCAAATTCCAAGACAGTTGGGTGAAGTTGCATCCTTTGGGGGCAGTAACATTGAGCCAAGTGTCCGG
AGCTGCTTCCAATTTGCTAATAATAAGCCAGAGATCGAAGCGGCCCTCTTCCTAGACTGGATGAGACTGGAACCC
CAGTCCATGGTGTGGCTGCCCGTCCTGCACAGAGTGGCTGCTGCAGAAACTGCCAAGCATCAGGCCAAATGTAAC
ATCTGCAAAGAGTGTCCAATCATTGGATTCAGGTACAGGAGTCTAAAGCACTTTAATTATGACATCTGCCAAAGC
TGCTTTTTTTCTGGTCGAGTTGCAAAAGGCCATAAAATGCACTATCCCATGGTGGAATATTGCACTCCGACTACA
TCAGGAGAAGATGTTCGAGACTTTGCCAAGGTACTAAAAAACAAATTTCGAACCAAAAGGTATTTTGCGAAGCAT
CCCCGAATGGGCTACCTGCCAGTGCAGACTGTCTTAGAGGGGGACAACATGGAAACTCCCGTTACTCTGATCAAC
TTCTGGCCAGTAGATTCTGCGCCTGCCTCGTCCCCTCAGCTTTCACACGATGATACTCATTCACGCATTGAACAT
TATGCTAGCAGGCTAGCAGAAATGGAAAACAGCAATGGATCTTATCTAAATGATAGCATCTCTCCTAATGAGAGC
ATAGATGATGAACATTTGTTAATCCAGCATTACTGCCAAAGTTTGAACCAGGACTCCCCCCTGAGCCAGCCTCGT
AGT
Human sequences with codon optimization:
(SEQ ID NO: 111)
ATGGCCAAGTACGGCGAGCACGAGGCCAGCCCCGACAACGGCCAGAACGAGTTCAGCGACATCATCAAGAGCCGG
AGCGACGAGCACAACGACGTGCAGAAGAAGACCTTCACCAAGTGGATCAACGCCCGGTTCAGCAAGAGCGGCAAG
CCCCCCATCAACGACATGTTCACCGACCTGAAGGACGGCCGGAAGCTGCTGGACCTGCTGGAGGGCCTGACCGGC
ACCAGCCTGCCCAAGGAGCGGGGCAGCACCCGGGTGCACGCCCTGAACAACGTGAACCGGGTGCTGCAGGTGCTG
CACCAGAACAACGTGGAGCTGGTGAACATCGGCGGCACCGACATCGTGGACGGCAACCACAAGCTGACCCTGGGC
CTGCTGTGGAGCATCATCCTGCACTGGCAGGTGAAGGACGTGATGAAGGACGTGATGAGCGACCTGCAGCAGACC
AACAGCGAGAAGATCCTGCTGAGCTGGGTGCGGCAGACCACCCGGCCCTACAGCCAGGTGAACGTGCTGAACTTC
ACCACCAGCTGGACCGACGGCCTGGCCTTCAACGCCGTGCTGCACCGGCACAAGCCCGACCTGTTCAGCTGGGAC
AAGGTGGTGAAGATGAGCCCCATCGAGCGGCTGGAGCACGCCTTCAGCAAGGCCCAGACCTACCTGGGCATCGAG
AAGCTGCTGGACCCCGAGGACGTGGCCGTGCAGCTGCCCGACAAGAAGAGCATCATCATGTACCTGACCAGCCTG
TTCGAGGTGCTGCCCCAGCAGGTGACCATCGACGCCATCCGGGAGGTGGAGACCCTGCCCCGGAAGTACAAGAAG
GAGTGCGAGGAGGAGGCCATCAACATCCAGAGCACCGCCCCCGAGGAGGAGCACGAGAGCCCCCGGGCCGAGACC
CCCAGCACCGTGACCGAGGTGGACATGGACCTGGACAGCTACCAGATCGCCCTGGAGGAGGTGCTGACCTGGCTG
CTGAGCGCCGAGGACACCTTCCAGGAGCAGGACGACATCAGCGACGACGTGGAGGAGGTGAAGGACCAGTTCGCC
ACCCACGAGGCCTTCATGATGGAGCTGACCGCCCACCAGAGCAGCGTGGGCAGCGTGCTGCAGGCCGGCAACCAG
CTGATCACCCAGGGCACCCTGAGCGACGAGGAGGAGTTCGAGATCCAGGAGCAGATGACCCTGCTGAACGCCCGG
TGGGAGGCCCTGCGGGTGGAGAGCATGGACCGGCAGAGCCGGCTGCACGACGTGCTGATGGAGCTGCAGAAGAAG
CAGCTGCAGCAGCTGAGCGCCTGGCTGACCCTGACCGAGGAGCGGATCCAGAAGATGGAGACCTGCCCCCTGGAC
GACGACGTGAAGAGCCTGCAGAAGCTGCTGGAGGAGCACAAGAGCCTGCAGAGCGACCTGGAGGCCGAGCAGGTG
AAGGTGAACAGCCTGACCCACATGGTGGTGATCGTGGACGAGAACAGCGGCGAGAGCGCCACCGCCATCCTGGAG
GACCAGCTGCAGAAGCTGGGCGAGCGGTGGACCGCCGTGTGCCGGTGGACCGAGGAGCGGTGGAACCGGCTGCAG
GAGATCGCCGCTAGCGCCATGATGGTGATGACCGAGGACATGCCCCTGGAGATCAGCTACGTGCCCAGCACCTAC
CTGACCGAGATCACCCACGTGAGCCAGGCCCTGCTGGAGGTGGAGCAGCTGCTGAACGCCCCCGACCTGTGCGCC
AAGGACTTCGAGGACCTGTTCAAGCAGGAGGAGAGCCTGAAGAACATCAAGGACAGCCTGCAGCAGAGCAGCGGC
CGGATCGACATCATCCACAGCAAGAAGACCGCCGCCCTGCAGAGCGCCACCCCCGTGGAGCGGGTGAAGCTGCAG
GAGGCCCTGAGCCAGCTGGACTTCCAGTGGGAGAAGGTGAACAAGATGTACAAGGACCGGCAGGGCCGGTTCGAC
CGGAGCGTGGAGAAGTGGCGGCGGTTCCACTACGACATCAAGATCTTCAACCAGTGGCTGACCGAGGCCGAGCAG
TTCCTGCGGAAGACCCAGATCCCCGAGAACTGGGAGCACGCCAAGTACAAGTGGTACCTGAAGGAGCTGCAGGAC
GGCATCGGCCAGCGGCAGACCGTGGTGCGGACCCTGAACGCCACCGGCGAGGAGATCATCCAGCAGAGCAGCAAG
ACCGACGCCAGCATCCTGCAGGAGAAGCTGGGCAGCCTGAACCTGCGGTGGCAGGAGGTGTGCAAGCAGCTGAGC
GACCGGAAGAAGCGGCTGGAGGAGCAGAAGTGGCAGCGGAAGATCGACGAGACCCTGGAGCGGCTGCAGGAGCTG
CAGGAGGCCACCGACGAGCTGGACCTGAAGCTGCGGCAGGCCGAGGTGATCAAGGGCAGCTGGCAGCCCGTGGGC
GACCTGCTGATCGACAGCCTGCAGGACCACCTGGAGAAGGTGAAGGCCCTGCGGGGCGAGATCGCCCCCCTGAAG
GAGAACGTGAGCCACGTGAACGACCTGGCCCGGCAGCTGACCACCCTGGGCATCCAGCTGAGCCCCTACAACCTG
AGCACCCTGGAGGACCTGAACACCCGGTGGAAGCTGCTGCAGGTGGCCGTGGAGGACCGGGTGCGGCAGCTGCAC
GAGGCCCACCGGGACTTCGGCCCCGCCAGCCAGCACTTCCTGAGCACCAGCGTGCAGGGCCCCTGGGAGCGGGCC
ATCAGCCCCAACAAGGTGCCCTACTACATCAACCACGAGACCCAGACCACCTGCTGGGACCACCCCAAGATGACC
GAGCTGTACCAGAGCCTGGCCGACCTGAACAACGTGCGGTTCAGCGCCTACCGGACCGCCATGAAGCTGCGGCGG
CTGCAGAAGGCCCTGTGCCTGGACCTGCTGAGCCTGAGCGCCGCCTGCGACGCCCTGGACCAGCACAACCTGAAG
CAGAACGACCAGCCCATGGACATCCTGCAGATCATCAACTGCCTGACCACCATCTACGACCGGCTGGAGCAGGAG
CACAACAACCTGGTGAACGTGCCCCTGTGCGTGGACATGTGCCTGAACTGGCTGCTGAACGTGTACGACACCGGC
CGGACCGGCCGGATCCGGGTGCTGAGCTTCAAGACCGGCATCATCAGCCTGTGCAAGGCCCACCTGGAGGACAAG
TACCGGTACCTGTTCAAGCAGGTGGCCAGCAGCACCGGCTTCTGCGACCAGCGGCGGCTGGGCCTGCTGCTGCAC
GACAGCATCCAGATCCCCCGGCAGCTGGGCGAGGTGGCCAGCTTCGGCGGCAGCAACATCGAGCCCAGCGTGCGG
AGCTGCTTCCAGTTCGCCAACAACAAGCCCGAGATCGAGGCCGCCCTGTTCCTGGACTGGATGCGGCTGGAGCCC
CAGAGCATGGTGTGGCTGCCCGTGCTGCACCGGGTGGCCGCCGCCGAGACCGCCAAGCACCAGGCCAAGTGCAAC
ATCTGCAAGGAGTGCCCCATCATCGGCTTCCGGTACCGGAGCCTGAAGCACTTCAACTACGACATCTGCCAGAGC
TGCTTCTTCAGCGGCCGGGTGGCCAAGGGCCACAAGATGCACTACCCCATGGTGGAGTACTGCACCCCCACCACC
AGCGGCGAGGACGTGCGGGACTTCGCCAAGGTGCTGAAGAACAAGTTCCGGACCAAGCGGTACTTCGCCAAGCAC
CCCCGGATGGGCTACCTGCCCGTGCAGACCGTGCTGGAGGGCGACAACATGGAGACCCCCGTGACCCTGATCAAC
TTCTGGCCCGTGGACAGCGCCCCCGCCAGCAGCCCCCAGCTGAGCCACGACGACACCCACAGCCGGATCGAGCAC
TACGCCAGCCGGCTGGCCGAGATGGAGAACAGCAACGGCAGCTACCTGAACGACAGCATCAGCCCCAACGAGAGC
ATCGACGACGAGCACCTGCTGATCCAGCACTACTGCCAGAGCCTGAACCAGGACAGCCCCCTGAGCCAGCCCCGG
AGC
Utrophin N-terminus through R2_Dystrophin R23 + R24 + H4 to end of syntrophin
region:
Human sequences without codon alterations:
(SEQ ID NO: 112)
ATGGCCAAGTATGGAGAACATGAAGCCAGTCCTGACAATGGGCAGAACGAATTCAGTGATATCATTAAGTCCAGA
TCTGATGAACACAATGACGTACAGAAGAAAACCTTTACCAAATGGATAAATGCTCGATTTTCAAAGAGTGGGAAA
CCACCCATCAATGATATGTTCACAGACCTCAAAGATGGAAGGAAGCTATTGGATCTTCTAGAAGGCCTCACAGGA
ACATCACTGCCAAAGGAACGTGGTTCCACAAGGGTACATGCCTTAAATAACGTCAACAGAGTGCTGCAGGTTTTA
CATCAGAACAATGTGGAATTAGTGAATATAGGGGGAACTGACATTGTGGATGGAAATCACAAACTGACTTTGGGG
TTACTTTGGAGCATCATTTTGCACTGGCAGGTGAAAGATGTCATGAAGGATGTCATGTCGGACCTGCAGCAGACG
AACAGTGAGAAGATCCTGCTCAGCTGGGTGCGTCAGACCACCAGGCCCTACAGCCAAGTCAACGTCCTCAACTTC
ACCACCAGCTGGACAGATGGACTCGCCTTTAATGCTGTCCTCCACCGACATAAACCTGATCTCTTCAGCTGGGAT
AAAGTTGTCAAAATGTCACCAATTGAGAGACTTGAACATGCCTTCAGCAAGGCTCAAACTTATTTGGGAATTGAA
AAGCTGTTAGATCCTGAAGATGTTGCCGTTCAGCTTCCTGACAAGAAATCCATAATTATGTATTTAACATCTTTG
TTTGAGGTGCTACCTCAGCAAGTCACCATAGACGCCATCCGTGAGGTAGAGACACTCCCAAGGAAATATAAAAAA
GAATGTGAAGAAGAGGCAATTAATATACAGAGTACAGCGCCTGAGGAGGAGCATGAGAGTCCCCGAGCTGAAACT
CCCAGCACTGTCACTGAGGTTGACATGGATCTGGACAGCTATCAGATTGCGTTGGAGGAAGTGCTGACCTGGTTG
CTTTCTGCTGAGGACACTTTCCAGGAGCAGGATGATATTTCTGATGATGTTGAAGAAGTCAAAGACCAGTTTGCA
ACCCATGAAGCTTTTATGATGGAACTGACTGCACACCAGAGCAGTGTGGGCAGCGTCCTGCAGGCAGGCAACCAA
CTGATAACACAAGGAACTCTGTCAGACGAAGAAGAATTTGAGATTCAGGAACAGATGACCCTGCTGAATGCTAGA
TGGGAGGCTCTTAGGGTGGAGAGTATGGACAGACAGTCCCGGCTGCACGATGTGCTGATGGAACTGCAGAAGAAG
CAACTGCAGCAGCTCTCCGCCTGGTTAACACTCACAGAGGAGCGCATTCAGAAGATGGAAACTTGCCCCCTGGAT
GATGATGTAAAATCTCTACAAAAGCTGCTAGAAGAACATAAAAGTTTGCAAAGTGATCTTGAGGCTGAACAGGTG
AAAGTAAATTCACTAACTCACATGGTGGTCATTGTTGATGAAAACAGTGGTGAGAGTGCTACAGCTATCCTAGAA
GACCAGTTACAGAAACTTGGTGAGCGCTGGACAGCAGTATGCCGTTGGACTGAAGAACGCTGGAATAGGTTACAA
GAAATCGCCGCTAGCGCCAGTTCTGACCAGTGGAAGCGTCTGCACCTTTCTCTGCAGGAACTTCTGGTGTGGCTA
CAGCTGAAAGATGATGAATTAAGCCGGCAGGCACCTATTGGAGGCGACTTTCCAGCAGTTCAGAAGCAGAACGAT
GTACATAGGGCCTTCAAGAGGGAATTGAAAACTAAAGAACCTGTAATCATGAGTACTCTTGAGACTGTACGAATA
TTTCTGACAGAGCAGCCTTTGGAAGGACTAGAGAAACTCTACCAGGAGCCCAGAGAGCTGCCTCCTGAGGAGAGA
GCCCAGAATGTCACTCGGCTTCTACGAAAGCAGGCTGAGGAGGTCAATACTGAGTGGGAAAAATTGAACCTGCAC
TCCGCTGACTGGCAGAGAAAAATAGATGAGACCCTTGAAAGACTCCGGGAACTTCAAGAGGCCACGGATGAGCTG
GACCTCAAGCTGCGCCAAGCTGAGGTGATCAAGGGATCCTGGCAGCCCGTGGGCGATCTCCTCATTGACTCTCTC
CAAGATCACCTCGAGAAAGTCAAGGCACTTCGAGGAGAAATTGCGCCTCTGAAAGAGAACGTGAGCCACGTCAAT
GACCTTGCTCGCCAGCTTACCACTTTGGGCATTCAGCTCTCACCGTATAACCTCAGCACTCTGGAAGACCTGAAC
ACCAGATGGAAGCTTCTGCAGGTGGCCGTCGAGGACCGAGTCAGGCAGCTGCATGAAGCCCACAGGGACTTTGGT
CCAGCATCTCAGCACTTTCTTTCCACGTCTGTCCAGGGTCCCTGGGAGAGAGCCATCTCGCCAAACAAAGTGCCC
TACTATATCAACCACGAGACTCAAACAACTTGCTGGGACCATCCCAAAATGACAGAGCTCTACCAGTCTTTAGCT
GACCTGAATAATGTCAGATTCTCAGCTTATAGGACTGCCATGAAACTCCGAAGACTGCAGAAGGCCCTTTGCTTG
GATCTCTTGAGCCTGTCAGCTGCATGTGATGCCTTGGACCAGCACAACCTCAAGCAAAATGACCAGCCCATGGAT
ATCCTGCAGATTATTAATTGTTTGACCACTATTTATGACCGCCTGGAGCAAGAGCACAACAATTTGGTCAACGTC
CCTCTCTGCGTGGATATGTGTCTGAACTGGCTGCTGAATGTTTATGATACGGGACGAACAGGGAGGATCCGTGTC
CTGTCTTTTAAAACTGGCATCATTTCCCTGTGTAAAGCACATTTGGAAGACAAGTACAGATACCTTTTCAAGCAA
GTGGCAAGTTCAACAGGATTTTGTGACCAGCGCAGGCTGGGCCTCCTTCTGCATGATTCTATCCAAATTCCAAGA
CAGTTGGGTGAAGTTGCATCCTTTGGGGGCAGTAACATTGAGCCAAGTGTCCGGAGCTGCTTCCAATTTGCTAAT
AATAAGCCAGAGATCGAAGCGGCCCTCTTCCTAGACTGGATGAGACTGGAACCCCAGTCCATGGTGTGGCTGCCC
GTCCTGCACAGAGTGGCTGCTGCAGAAACTGCCAAGCATCAGGCCAAATGTAACATCTGCAAAGAGTGTCCAATC
ATTGGATTCAGGTACAGGAGTCTAAAGCACTTTAATTATGACATCTGCCAAAGCTGCTTTTTTTCTGGTCGAGTT
GCAAAAGGCCATAAAATGCACTATCCCATGGTGGAATATTGCACTCCGACTACATCAGGAGAAGATGTTCGAGAC
TTTGCCAAGGTACTAAAAAACAAATTTCGAACCAAAAGGTATTTTGCGAAGCATCCCCGAATGGGCTACCTGCCA
GTGCAGACTGTCTTAGAGGGGGACAACATGGAAACTCCCGTTACTCTGATCAACTTCTGGCCAGTAGATTCTGCG
CCTGCCTCGTCCCCTCAGCTTTCACACGATGATACTCATTCACGCATTGAACATTATGCTAGCAGGCTAGCAGAA
ATGGAAAACAGCAATGGATCTTATCTAAATGATAGCATCTCTCCTAATGAGAGCATAGATGATGAACATTTGTTA
ATCCAGCATTACTGCCAAAGTTTGAACCAGGACTCCCCCCTGAGCCAGCCTCGTAGT
Human sequences with codon optimization:
(SEQ ID NO: 113)
ATGGCCAAGTACGGCGAGCACGAGGCCAGCCCCGACAACGGCCAGAACGAGTTCAGCGACATCATCAAGAGCCGG
AGCGACGAGCACAACGACGTGCAGAAGAAGACCTTCACCAAGTGGATCAACGCCCGGTTCAGCAAGAGCGGCAAG
CCCCCCATCAACGACATGTTCACCGACCTGAAGGACGGCCGGAAGCTGCTGGACCTGCTGGAGGGCCTGACCGGC
ACCAGCCTGCCCAAGGAGCGGGGCAGCACCCGGGTGCACGCCCTGAACAACGTGAACCGGGTGCTGCAGGTGCTG
CACCAGAACAACGTGGAGCTGGTGAACATCGGCGGCACCGACATCGTGGACGGCAACCACAAGCTGACCCTGGGC
CTGCTGTGGAGCATCATCCTGCACTGGCAGGTGAAGGACGTGATGAAGGACGTGATGAGCGACCTGCAGCAGACC
AACAGCGAGAAGATCCTGCTGAGCTGGGTGCGGCAGACCACCCGGCCCTACAGCCAGGTGAACGTGCTGAACTTC
ACCACCAGCTGGACCGACGGCCTGGCCTTCAACGCCGTGCTGCACCGGCACAAGCCCGACCTGTTCAGCTGGGAC
AAGGTGGTGAAGATGAGCCCCATCGAGCGGCTGGAGCACGCCTTCAGCAAGGCCCAGACCTACCTGGGCATCGAG
AAGCTGCTGGACCCCGAGGACGTGGCCGTGCAGCTGCCCGACAAGAAGAGCATCATCATGTACCTGACCAGCCTG
TTCGAGGTGCTGCCCCAGCAGGTGACCATCGACGCCATCCGGGAGGTGGAGACCCTGCCCCGGAAGTACAAGAAG
GAGTGCGAGGAGGAGGCCATCAACATCCAGAGCACCGCCCCCGAGGAGGAGCACGAGAGCCCCCGGGCCGAGACC
CCCAGCACCGTGACCGAGGTGGACATGGACCTGGACAGCTACCAGATCGCCCTGGAGGAGGTGCTGACCTGGCTG
CTGAGCGCCGAGGACACCTTCCAGGAGCAGGACGACATCAGCGACGACGTGGAGGAGGTGAAGGACCAGTTCGCC
ACCCACGAGGCCTTCATGATGGAGCTGACCGCCCACCAGAGCAGCGTGGGCAGCGTGCTGCAGGCCGGCAACCAG
CTGATCACCCAGGGCACCCTGAGCGACGAGGAGGAGTTCGAGATCCAGGAGCAGATGACCCTGCTGAACGCCCGG
TGGGAGGCCCTGCGGGTGGAGAGCATGGACCGGCAGAGCCGGCTGCACGACGTGCTGATGGAGCTGCAGAAGAAG
CAGCTGCAGCAGCTGAGCGCCTGGCTGACCCTGACCGAGGAGCGGATCCAGAAGATGGAGACCTGCCCCCTGGAC
GACGACGTGAAGAGCCTGCAGAAGCTGCTGGAGGAGCACAAGAGCCTGCAGAGCGACCTGGAGGCCGAGCAGGTG
AAGGTGAACAGCCTGACCCACATGGTGGTGATCGTGGACGAGAACAGCGGCGAGAGCGCCACCGCCATCCTGGAG
GACCAGCTGCAGAAGCTGGGCGAGCGGTGGACCGCCGTGTGCCGGTGGACCGAGGAGCGGTGGAACCGGCTGCAG
GAGATCGCCGCTAGCGCCAGCAGCGACCAGTGGAAGCGGCTGCACCTGAGCCTGCAGGAGCTGCTGGTGTGGCTG
CAGCTGAAGGACGACGAGCTGAGCCGGCAGGCCCCCATCGGCGGCGACTTCCCCGCCGTGCAGAAGCAGAACGAC
GTGCACCGGGCCTTCAAGCGGGAGCTGAAGACCAAGGAGCCCGTGATCATGAGCACCCTGGAGACCGTGCGGATC
TTCCTGACCGAGCAGCCCCTGGAGGGCCTGGAGAAGCTGTACCAGGAGCCCCGGGAGCTGCCCCCCGAGGAGCGG
GCCCAGAACGTGACCCGGCTGCTGCGGAAGCAGGCCGAGGAGGTGAACACCGAGTGGGAGAAGCTGAACCTGCAC
AGCGCCGACTGGCAGCGGAAGATCGACGAGACCCTGGAGCGGCTGCAGGAGCTGCAGGAGGCCACCGACGAGCTG
GACCTGAAGCTGCGGCAGGCCGAGGTGATCAAGGGCAGCTGGCAGCCCGTGGGCGACCTGCTGATCGACAGCCTG
CAGGACCACCTGGAGAAGGTGAAGGCCCTGCGGGGCGAGATCGCCCCCCTGAAGGAGAACGTGAGCCACGTGAAC
GACCTGGCCCGGCAGCTGACCACCCTGGGCATCCAGCTGAGCCCCTACAACCTGAGCACCCTGGAGGACCTGAAC
ACCCGGTGGAAGCTGCTGCAGGTGGCCGTGGAGGACCGGGTGCGGCAGCTGCACGAGGCCCACCGGGACTTCGGC
CCCGCCAGCCAGCACTTCCTGAGCACCAGCGTGCAGGGCCCCTGGGAGCGGGCCATCAGCCCCAACAAGGTGCCC
TACTACATCAACCACGAGACCCAGACCACCTGCTGGGACCACCCCAAGATGACCGAGCTGTACCAGAGCCTGGCC
GACCTGAACAACGTGCGGTTCAGCGCCTACCGGACCGCCATGAAGCTGCGGCGGCTGCAGAAGGCCCTGTGCCTG
GACCTGCTGAGCCTGAGCGCCGCCTGCGACGCCCTGGACCAGCACAACCTGAAGCAGAACGACCAGCCCATGGAC
ATCCTGCAGATCATCAACTGCCTGACCACCATCTACGACCGGCTGGAGCAGGAGCACAACAACCTGGTGAACGTG
CCCCTGTGCGTGGACATGTGCCTGAACTGGCTGCTGAACGTGTACGACACCGGCCGGACCGGCCGGATCCGGGTG
CTGAGCTTCAAGACCGGCATCATCAGCCTGTGCAAGGCCCACCTGGAGGACAAGTACCGGTACCTGTTCAAGCAG
GTGGCCAGCAGCACCGGCTTCTGCGACCAGCGGCGGCTGGGCCTGCTGCTGCACGACAGCATCCAGATCCCCCGG
CAGCTGGGCGAGGTGGCCAGCTTCGGCGGCAGCAACATCGAGCCCAGCGTGCGGAGCTGCTTCCAGTTCGCCAAC
AACAAGCCCGAGATCGAGGCCGCCCTGTTCCTGGACTGGATGCGGCTGGAGCCCCAGAGCATGGTGTGGCTGCCC
GTGCTGCACCGGGTGGCCGCCGCCGAGACCGCCAAGCACCAGGCCAAGTGCAACATCTGCAAGGAGTGCCCCATC
ATCGGCTTCCGGTACCGGAGCCTGAAGCACTTCAACTACGACATCTGCCAGAGCTGCTTCTTCAGCGGCCGGGTG
GCCAAGGGCCACAAGATGCACTACCCCATGGTGGAGTACTGCACCCCCACCACCAGCGGCGAGGACGTGCGGGAC
TTCGCCAAGGTGCTGAAGAACAAGTTCCGGACCAAGCGGTACTTCGCCAAGCACCCCCGGATGGGCTACCTGCCC
GTGCAGACCGTGCTGGAGGGCGACAACATGGAGACCCCCGTGACCCTGATCAACTTCTGGCCCGTGGACAGCGCC
CCCGCCAGCAGCCCCCAGCTGAGCCACGACGACACCCACAGCCGGATCGAGCACTACGCCAGCCGGCTGGCCGAG
ATGGAGAACAGCAACGGCAGCTACCTGAACGACAGCATCAGCCCCAACGAGAGCATCGACGACGAGCACCTGCTG
ATCCAGCACTACTGCCAGAGCCTGAACCAGGACAGCCCCCTGAGCCAGCCCCGGAGC
Utrophin N-terminus through R2_Dystrophin R23 to end of 1st Coiled Coil:
Human sequences without codon alterations:
(SEQ ID NO: 114)
ATGGCCAAGTATGGAGAACATGAAGCCAGTCCTGACAATGGGCAGAACGAATTCAGTGATATCATTAAGTCCAGA
TCTGATGAACACAATGACGTACAGAAGAAAACCTTTACCAAATGGATAAATGCTCGATTTTCAAAGAGTGGGAAA
CCACCCATCAATGATATGTTCACAGACCTCAAAGATGGAAGGAAGCTATTGGATCTTCTAGAAGGCCTCACAGGA
ACATCACTGCCAAAGGAACGTGGTTCCACAAGGGTACATGCCTTAAATAACGTCAACAGAGTGCTGCAGGTTTTA
CATCAGAACAATGTGGAATTAGTGAATATAGGGGGAACTGACATTGTGGATGGAAATCACAAACTGACTTTGGGG
TTACTTTGGAGCATCATTTTGCACTGGCAGGTGAAAGATGTCATGAAGGATGTCATGTCGGACCTGCAGCAGACG
AACAGTGAGAAGATCCTGCTCAGCTGGGTGCGTCAGACCACCAGGCCCTACAGCCAAGTCAACGTCCTCAACTTC
ACCACCAGCTGGACAGATGGACTCGCCTTTAATGCTGTCCTCCACCGACATAAACCTGATCTCTTCAGCTGGGAT
AAAGTTGTCAAAATGTCACCAATTGAGAGACTTGAACATGCCTTCAGCAAGGCTCAAACTTATTTGGGAATTGAA
AAGCTGTTAGATCCTGAAGATGTTGCCGTTCAGCTTCCTGACAAGAAATCCATAATTATGTATTTAACATCTTTG
TTTGAGGTGCTACCTCAGCAAGTCACCATAGACGCCATCCGTGAGGTAGAGACACTCCCAAGGAAATATAAAAAA
GAATGTGAAGAAGAGGCAATTAATATACAGAGTACAGCGCCTGAGGAGGAGCATGAGAGTCCCCGAGCTGAAACT
CCCAGCACTGTCACTGAGGTTGACATGGATCTGGACAGCTATCAGATTGCGTTGGAGGAAGTGCTGACCTGGTTG
CTTTCTGCTGAGGACACTTTCCAGGAGCAGGATGATATTTCTGATGATGTTGAAGAAGTCAAAGACCAGTTTGCA
ACCCATGAAGCTTTTATGATGGAACTGACTGCACACCAGAGCAGTGTGGGCAGCGTCCTGCAGGCAGGCAACCAA
CTGATAACACAAGGAACTCTGTCAGACGAAGAAGAATTTGAGATTCAGGAACAGATGACCCTGCTGAATGCTAGA
TGGGAGGCTCTTAGGGTGGAGAGTATGGACAGACAGTCCCGGCTGCACGATGTGCTGATGGAACTGCAGAAGAAG
CAACTGCAGCAGCTCTCCGCCTGGTTAACACTCACAGAGGAGCGCATTCAGAAGATGGAAACTTGCCCCCTGGAT
GATGATGTAAAATCTCTACAAAAGCTGCTAGAAGAACATAAAAGTTTGCAAAGTGATCTTGAGGCTGAACAGGTG
AAAGTAAATTCACTAACTCACATGGTGGTCATTGTTGATGAAAACAGTGGTGAGAGTGCTACAGCTATCCTAGAA
GACCAGTTACAGAAACTTGGTGAGCGCTGGACAGCAGTATGCCGTTGGACTGAAGAACGCTGGAATAGGTTACAA
GAAATCGCCGCTAGCGCCAGTTCTGACCAGTGGAAGCGTCTGCACCTTTCTCTGCAGGAACTTCTGGTGTGGCTA
CAGCTGAAAGATGATGAATTAAGCCGGCAGGCACCTATTGGAGGCGACTTTCCAGCAGTTCAGAAGCAGAACGAT
GTACATAGGGCCTTCAAGAGGGAATTGAAAACTAAAGAACCTGTAATCATGAGTACTCTTGAGACTGTACGAATA
TTTCTGACAGAGCAGCCTTTGGAAGGACTAGAGAAACTCTACCAGGAGCCCAGAGAGCTGCCTCCTGAGGAGAGA
GCCCAGAATGTCACTCGGCTTCTACGAAAGCAGGCTGAGGAGGTCAATACTGAGTGGGAAAAATTGAACCTGCAC
TCCGCTGACTGGCAGAGAAAAATAGATGAGACCCTTGAAAGACTCCGGGAACTTCAAGAGGCCACGGATGAGCTG
GACCTCAAGCTGCGCCAAGCTGAGGTGATCAAGGGATCCTGGCAGCCCGTGGGCGATCTCCTCATTGACTCTCTC
CAAGATCACCTCGAGAAAGTCAAGGCACTTCGAGGAGAAATTGCGCCTCTGAAAGAGAACGTGAGCCACGTCAAT
GACCTTGCTCGCCAGCTTACCACTTTGGGCATTCAGCTCTCACCGTATAACCTCAGCACTCTGGAAGACCTGAAC
ACCAGATGGAAGCTTCTGCAGGTGGCCGTCGAGGACCGAGTCAGGCAGCTGCATGAAGCCCACAGGGACTTTGGT
CCAGCATCTCAGCACTTTCTTTCCACGTCTGTCCAGGGTCCCTGGGAGAGAGCCATCTCGCCAAACAAAGTGCCC
TACTATATCAACCACGAGACTCAAACAACTTGCTGGGACCATCCCAAAATGACAGAGCTCTACCAGTCTTTAGCT
GACCTGAATAATGTCAGATTCTCAGCTTATAGGACTGCCATGAAACTCCGAAGACTGCAGAAGGCCCTTTGCTTG
GATCTCTTGAGCCTGTCAGCTGCATGTGATGCCTTGGACCAGCACAACCTCAAGCAAAATGACCAGCCCATGGAT
ATCCTGCAGATTATTAATTGTTTGACCACTATTTATGACCGCCTGGAGCAAGAGCACAACAATTTGGTCAACGTC
CCTCTCTGCGTGGATATGTGTCTGAACTGGCTGCTGAATGTTTATGATACGGGACGAACAGGGAGGATCCGTGTC
CTGTCTTTTAAAACTGGCATCATTTCCCTGTGTAAAGCACATTTGGAAGACAAGTACAGATACCTTTTCAAGCAA
GTGGCAAGTTCAACAGGATTTTGTGACCAGCGCAGGCTGGGCCTCCTTCTGCATGATTCTATCCAAATTCCAAGA
CAGTTGGGTGAAGTTGCATCCTTTGGGGGCAGTAACATTGAGCCAAGTGTCCGGAGCTGCTTCCAATTTGCTAAT
AATAAGCCAGAGATCGAAGCGGCCCTCTTCCTAGACTGGATGAGACTGGAACCCCAGTCCATGGTGTGGCTGCCC
GTCCTGCACAGAGTGGCTGCTGCAGAAACTGCCAAGCATCAGGCCAAATGTAACATCTGCAAAGAGTGTCCAATC
ATTGGATTCAGGTACAGGAGTCTAAAGCACTTTAATTATGACATCTGCCAAAGCTGCTTTTTTTCTGGTCGAGTT
GCAAAAGGCCATAAAATGCACTATCCCATGGTGGAATATTGCACTCCGACTACATCAGGAGAAGATGTTCGAGAC
TTTGCCAAGGTACTAAAAAACAAATTTCGAACCAAAAGGTATTTTGCGAAGCATCCCCGAATGGGCTACCTGCCA
GTGCAGACTGTCTTAGAGGGGGACAACATGGAAACTCCCGTTACTCTGATCAACTTCTGGCCAGTAGATTCTGCG
CCTGCCTCGTCCCCTCAGCTTTCACACGATGATACTCATTCACGCATTGAACATTATGCTAGCAGGCTAGCAGAA
ATGGAAAACAGCAATGGATCTTATCTAAATGATAGCATCTCTCCTAATGAGAGCATAGATGATGAACATTTGTTA
ATCCAGCATTACTGCCAAAGTTTGAACCAGGACTCCCCCCTGAGCCAGCCTCGTAGTCCTGCCCAGATCTTGATT
TCCTTAGAGAGTGAGGAAAGAGGGGAGCTAGAGAGAATCCTAGCAGATCTTGAGGAAGAAAACAGGAATCTGCAA
GCAGAATATGACCGTCTAAAGCAGCAGCACGAACATAAAGGCCTGTCCCCACTGCCGTCCCCTCCTGAAATGATG
CCCACCTCTCCCCAGAGTCCC
Human sequences with codon optimization:
(SEQ ID NO: 115)
ATGGCCAAGTACGGCGAGCACGAGGCCAGCCCCGACAACGGCCAGAACGAGTTCAGCGACATCATCAAGAGCCGG
AGCGACGAGCACAACGACGTGCAGAAGAAGACCTTCACCAAGTGGATCAACGCCCGGTTCAGCAAGAGCGGCAAG
CCCCCCATCAACGACATGTTCACCGACCTGAAGGACGGCCGGAAGCTGCTGGACCTGCTGGAGGGCCTGACCGGC
ACCAGCCTGCCCAAGGAGCGGGGCAGCACCCGGGTGCACGCCCTGAACAACGTGAACCGGGTGCTGCAGGTGCTG
CACCAGAACAACGTGGAGCTGGTGAACATCGGCGGCACCGACATCGTGGACGGCAACCACAAGCTGACCCTGGGC
CTGCTGTGGAGCATCATCCTGCACTGGCAGGTGAAGGACGTGATGAAGGACGTGATGAGCGACCTGCAGCAGACC
AACAGCGAGAAGATCCTGCTGAGCTGGGTGCGGCAGACCACCCGGCCCTACAGCCAGGTGAACGTGCTGAACTTC
ACCACCAGCTGGACCGACGGCCTGGCCTTCAACGCCGTGCTGCACCGGCACAAGCCCGACCTGTTCAGCTGGGAC
AAGGTGGTGAAGATGAGCCCCATCGAGCGGCTGGAGCACGCCTTCAGCAAGGCCCAGACCTACCTGGGCATCGAG
AAGCTGCTGGACCCCGAGGACGTGGCCGTGCAGCTGCCCGACAAGAAGAGCATCATCATGTACCTGACCAGCCTG
TTCGAGGTGCTGCCCCAGCAGGTGACCATCGACGCCATCCGGGAGGTGGAGACCCTGCCCCGGAAGTACAAGAAG
GAGTGCGAGGAGGAGGCCATCAACATCCAGAGCACCGCCCCCGAGGAGGAGCACGAGAGCCCCCGGGCCGAGACC
CCCAGCACCGTGACCGAGGTGGACATGGACCTGGACAGCTACCAGATCGCCCTGGAGGAGGTGCTGACCTGGCTG
CTGAGCGCCGAGGACACCTTCCAGGAGCAGGACGACATCAGCGACGACGTGGAGGAGGTGAAGGACCAGTTCGCC
ACCCACGAGGCCTTCATGATGGAGCTGACCGCCCACCAGAGCAGCGTGGGCAGCGTGCTGCAGGCCGGCAACCAG
CTGATCACCCAGGGCACCCTGAGCGACGAGGAGGAGTTCGAGATCCAGGAGCAGATGACCCTGCTGAACGCCCGG
TGGGAGGCCCTGCGGGTGGAGAGCATGGACCGGCAGAGCCGGCTGCACGACGTGCTGATGGAGCTGCAGAAGAAG
CAGCTGCAGCAGCTGAGCGCCTGGCTGACCCTGACCGAGGAGCGGATCCAGAAGATGGAGACCTGCCCCCTGGAC
GACGACGTGAAGAGCCTGCAGAAGCTGCTGGAGGAGCACAAGAGCCTGCAGAGCGACCTGGAGGCCGAGCAGGTG
AAGGTGAACAGCCTGACCCACATGGTGGTGATCGTGGACGAGAACAGCGGCGAGAGCGCCACCGCCATCCTGGAG
GACCAGCTGCAGAAGCTGGGCGAGCGGTGGACCGCCGTGTGCCGGTGGACCGAGGAGCGGTGGAACCGGCTGCAG
GAGATCGCCGCTAGCGCCAGCAGCGACCAGTGGAAGCGGCTGCACCTGAGCCTGCAGGAGCTGCTGGTGTGGCTG
CAGCTGAAGGACGACGAGCTGAGCCGGCAGGCCCCCATCGGCGGCGACTTCCCCGCCGTGCAGAAGCAGAACGAC
GTGCACCGGGCCTTCAAGCGGGAGCTGAAGACCAAGGAGCCCGTGATCATGAGCACCCTGGAGACCGTGCGGATC
TTCCTGACCGAGCAGCCCCTGGAGGGCCTGGAGAAGCTGTACCAGGAGCCCCGGGAGCTGCCCCCCGAGGAGCGG
GCCCAGAACGTGACCCGGCTGCTGCGGAAGCAGGCCGAGGAGGTGAACACCGAGTGGGAGAAGCTGAACCTGCAC
AGCGCCGACTGGCAGCGGAAGATCGACGAGACCCTGGAGCGGCTGCAGGAGCTGCAGGAGGCCACCGACGAGCTG
GACCTGAAGCTGCGGCAGGCCGAGGTGATCAAGGGCAGCTGGCAGCCCGTGGGCGACCTGCTGATCGACAGCCTG
CAGGACCACCTGGAGAAGGTGAAGGCCCTGCGGGGCGAGATCGCCCCCCTGAAGGAGAACGTGAGCCACGTGAAC
GACCTGGCCCGGCAGCTGACCACCCTGGGCATCCAGCTGAGCCCCTACAACCTGAGCACCCTGGAGGACCTGAAC
ACCCGGTGGAAGCTGCTGCAGGTGGCCGTGGAGGACCGGGTGCGGCAGCTGCACGAGGCCCACCGGGACTTCGGC
CCCGCCAGCCAGCACTTCCTGAGCACCAGCGTGCAGGGCCCCTGGGAGCGGGCCATCAGCCCCAACAAGGTGCCC
TACTACATCAACCACGAGACCCAGACCACCTGCTGGGACCACCCCAAGATGACCGAGCTGTACCAGAGCCTGGCC
GACCTGAACAACGTGCGGTTCAGCGCCTACCGGACCGCCATGAAGCTGCGGCGGCTGCAGAAGGCCCTGTGCCTG
GACCTGCTGAGCCTGAGCGCCGCCTGCGACGCCCTGGACCAGCACAACCTGAAGCAGAACGACCAGCCCATGGAC
ATCCTGCAGATCATCAACTGCCTGACCACCATCTACGACCGGCTGGAGCAGGAGCACAACAACCTGGTGAACGTG
CCCCTGTGCGTGGACATGTGCCTGAACTGGCTGCTGAACGTGTACGACACCGGCCGGACCGGCCGGATCCGGGTG
CTGAGCTTCAAGACCGGCATCATCAGCCTGTGCAAGGCCCACCTGGAGGACAAGTACCGGTACCTGTTCAAGCAG
GTGGCCAGCAGCACCGGCTTCTGCGACCAGCGGCGGCTGGGCCTGCTGCTGCACGACAGCATCCAGATCCCCCGG
CAGCTGGGCGAGGTGGCCAGCTTCGGCGGCAGCAACATCGAGCCCAGCGTGCGGAGCTGCTTCCAGTTCGCCAAC
AACAAGCCCGAGATCGAGGCCGCCCTGTTCCTGGACTGGATGCGGCTGGAGCCCCAGAGCATGGTGTGGCTGCCC
GTGCTGCACCGGGTGGCCGCCGCCGAGACCGCCAAGCACCAGGCCAAGTGCAACATCTGCAAGGAGTGCCCCATC
ATCGGCTTCCGGTACCGGAGCCTGAAGCACTTCAACTACGACATCTGCCAGAGCTGCTTCTTCAGCGGCCGGGTG
GCCAAGGGCCACAAGATGCACTACCCCATGGTGGAGTACTGCACCCCCACCACCAGCGGCGAGGACGTGCGGGAC
TTCGCCAAGGTGCTGAAGAACAAGTTCCGGACCAAGCGGTACTTCGCCAAGCACCCCCGGATGGGCTACCTGCCC
GTGCAGACCGTGCTGGAGGGCGACAACATGGAGACCCCCGTGACCCTGATCAACTTCTGGCCCGTGGACAGCGCC
CCCGCCAGCAGCCCCCAGCTGAGCCACGACGACACCCACAGCCGGATCGAGCACTACGCCAGCCGGCTGGCCGAG
ATGGAGAACAGCAACGGCAGCTACCTGAACGACAGCATCAGCCCCAACGAGAGCATCGACGACGAGCACCTGCTG
ATCCAGCACTACTGCCAGAGCCTGAACCAGGACAGCCCCCTGAGCCAGCCCCGGAGCCCCGCCCAGATCCTGATC
AGCCTGGAGAGCGAGGAGCGGGGCGAGCTGGAGCGGATCCTGGCCGACCTGGAGGAGGAGAACCGGAACCTGCAG
GCCGAGTACGACCGGCTGAAGCAGCAGCACGAGCACAAGGGCCTGAGCCCCCTGCCCAGCCCCCCCGAGATGATG
CCCACCAGCCCCCAGAGCCCC
Utrophin N-terminus through R3_Dystrophin R23 + R24 + H4 to end of syntrophin
region:
Human sequences without codon alterations:
(SEQ ID NO: 116)
ATGGCCAAGTATGGAGAACATGAAGCCAGTCCTGACAATGGGCAGAACGAATTCAGTGATATCATTAAGTCCAGA
TCTGATGAACACAATGACGTACAGAAGAAAACCTTTACCAAATGGATAAATGCTCGATTTTCAAAGAGTGGGAAA
CCACCCATCAATGATATGTTCACAGACCTCAAAGATGGAAGGAAGCTATTGGATCTTCTAGAAGGCCTCACAGGA
ACATCACTGCCAAAGGAACGTGGTTCCACAAGGGTACATGCCTTAAATAACGTCAACAGAGTGCTGCAGGTTTTA
CATCAGAACAATGTGGAATTAGTGAATATAGGGGGAACTGACATTGTGGATGGAAATCACAAACTGACTTTGGGG
TTACTTTGGAGCATCATTTTGCACTGGCAGGTGAAAGATGTCATGAAGGATGTCATGTCGGACCTGCAGCAGACG
AACAGTGAGAAGATCCTGCTCAGCTGGGTGCGTCAGACCACCAGGCCCTACAGCCAAGTCAACGTCCTCAACTTC
ACCACCAGCTGGACAGATGGACTCGCCTTTAATGCTGTCCTCCACCGACATAAACCTGATCTCTTCAGCTGGGAT
AAAGTTGTCAAAATGTCACCAATTGAGAGACTTGAACATGCCTTCAGCAAGGCTCAAACTTATTTGGGAATTGAA
AAGCTGTTAGATCCTGAAGATGTTGCCGTTCAGCTTCCTGACAAGAAATCCATAATTATGTATTTAACATCTTTG
TTTGAGGTGCTACCTCAGCAAGTCACCATAGACGCCATCCGTGAGGTAGAGACACTCCCAAGGAAATATAAAAAA
GAATGTGAAGAAGAGGCAATTAATATACAGAGTACAGCGCCTGAGGAGGAGCATGAGAGTCCCCGAGCTGAAACT
CCCAGCACTGTCACTGAGGTTGACATGGATCTGGACAGCTATCAGATTGCGTTGGAGGAAGTGCTGACCTGGTTG
CTTTCTGCTGAGGACACTTTCCAGGAGCAGGATGATATTTCTGATGATGTTGAAGAAGTCAAAGACCAGTTTGCA
ACCCATGAAGCTTTTATGATGGAACTGACTGCACACCAGAGCAGTGTGGGCAGCGTCCTGCAGGCAGGCAACCAA
CTGATAACACAAGGAACTCTGTCAGACGAAGAAGAATTTGAGATTCAGGAACAGATGACCCTGCTGAATGCTAGA
TGGGAGGCTCTTAGGGTGGAGAGTATGGACAGACAGTCCCGGCTGCACGATGTGCTGATGGAACTGCAGAAGAAG
CAACTGCAGCAGCTCTCCGCCTGGTTAACACTCACAGAGGAGCGCATTCAGAAGATGGAAACTTGCCCCCTGGAT
GATGATGTAAAATCTCTACAAAAGCTGCTAGAAGAACATAAAAGTTTGCAAAGTGATCTTGAGGCTGAACAGGTG
AAAGTAAATTCACTAACTCACATGGTGGTCATTGTTGATGAAAACAGTGGTGAGAGTGCTACAGCTATCCTAGAA
GACCAGTTACAGAAACTTGGTGAGCGCTGGACAGCAGTATGCCGTTGGACTGAAGAACGCTGGAATAGGTTACAA
GAAATCAATATATTGTGGCAGGAATTATTGGAAGAACAGTGCTTGTTGAAAGCTTGGTTAACCGAAAAAGAAGAG
GCTTTAAATAAAGTCCAGACAAGCAACTTCAAAGACCAAAAGGAACTAAGTGTCAGTGTTCGACGTCTGGCTATT
TTGAAGGAAGACATGGAAATGAAGCGTCAAACATTGGATCAGCTGAGTGAGATTGGCCAGGATGTGGGACAATTA
CTTGATAATTCCAAGGCATCTAAGAAGATCAACAGTGACTCAGAGGAACTGACTCAAAGATGGGATTCTTTGGTT
CAGAGACTAGAAGATTCCTCCAACCAGGTGACTCAGGCTGCCGCTAGCGCCAGTTCTGACCAGTGGAAGCGTCTG
CACCTTTCTCTGCAGGAACTTCTGGTGTGGCTACAGCTGAAAGATGATGAATTAAGCCGGCAGGCACCTATTGGA
GGCGACTTTCCAGCAGTTCAGAAGCAGAACGATGTACATAGGGCCTTCAAGAGGGAATTGAAAACTAAAGAACCT
GTAATCATGAGTACTCTTGAGACTGTACGAATATTTCTGACAGAGCAGCCTTTGGAAGGACTAGAGAAACTCTAC
CAGGAGCCCAGAGAGCTGCCTCCTGAGGAGAGAGCCCAGAATGTCACTCGGCTTCTACGAAAGCAGGCTGAGGAG
GTCAATACTGAGTGGGAAAAATTGAACCTGCACTCCGCTGACTGGCAGAGAAAAATAGATGAGACCCTTGAAAGA
CTCCGGGAACTTCAAGAGGCCACGGATGAGCTGGACCTCAAGCTGCGCCAAGCTGAGGTGATCAAGGGATCCTGG
CAGCCCGTGGGCGATCTCCTCATTGACTCTCTCCAAGATCACCTCGAGAAAGTCAAGGCACTTCGAGGAGAAATT
GCGCCTCTGAAAGAGAACGTGAGCCACGTCAATGACCTTGCTCGCCAGCTTACCACTTTGGGCATTCAGCTCTCA
CCGTATAACCTCAGCACTCTGGAAGACCTGAACACCAGATGGAAGCTTCTGCAGGTGGCCGTCGAGGACCGAGTC
AGGCAGCTGCATGAAGCCCACAGGGACTTTGGTCCAGCATCTCAGCACTTTCTTTCCACGTCTGTCCAGGGTCCC
TGGGAGAGAGCCATCTCGCCAAACAAAGTGCCCTACTATATCAACCACGAGACTCAAACAACTTGCTGGGACCAT
CCCAAAATGACAGAGCTCTACCAGTCTTTAGCTGACCTGAATAATGTCAGATTCTCAGCTTATAGGACTGCCATG
AAACTCCGAAGACTGCAGAAGGCCCTTTGCTTGGATCTCTTGAGCCTGTCAGCTGCATGTGATGCCTTGGACCAG
CACAACCTCAAGCAAAATGACCAGCCCATGGATATCCTGCAGATTATTAATTGTTTGACCACTATTTATGACCGC
CTGGAGCAAGAGCACAACAATTTGGTCAACGTCCCTCTCTGCGTGGATATGTGTCTGAACTGGCTGCTGAATGTT
TATGATACGGGACGAACAGGGAGGATCCGTGTCCTGTCTTTTAAAACTGGCATCATTTCCCTGTGTAAAGCACAT
TTGGAAGACAAGTACAGATACCTTTTCAAGCAAGTGGCAAGTTCAACAGGATTTTGTGACCAGCGCAGGCTGGGC
CTCCTTCTGCATGATTCTATCCAAATTCCAAGACAGTTGGGTGAAGTTGCATCCTTTGGGGGCAGTAACATTGAG
CCAAGTGTCCGGAGCTGCTTCCAATTTGCTAATAATAAGCCAGAGATCGAAGCGGCCCTCTTCCTAGACTGGATG
AGACTGGAACCCCAGTCCATGGTGTGGCTGCCCGTCCTGCACAGAGTGGCTGCTGCAGAAACTGCCAAGCATCAG
GCCAAATGTAACATCTGCAAAGAGTGTCCAATCATTGGATTCAGGTACAGGAGTCTAAAGCACTTTAATTATGAC
ATCTGCCAAAGCTGCTTTTTTTCTGGTCGAGTTGCAAAAGGCCATAAAATGCACTATCCCATGGTGGAATATTGC
ACTCCGACTACATCAGGAGAAGATGTTCGAGACTTTGCCAAGGTACTAAAAAACAAATTTCGAACCAAAAGGTAT
TTTGCGAAGCATCCCCGAATGGGCTACCTGCCAGTGCAGACTGTCTTAGAGGGGGACAACATGGAAACTCCCGTT
ACTCTGATCAACTTCTGGCCAGTAGATTCTGCGCCTGCCTCGTCCCCTCAGCTTTCACACGATGATACTCATTCA
CGCATTGAACATTATGCTAGCAGGCTAGCAGAAATGGAAAACAGCAATGGATCTTATCTAAATGATAGCATCTCT
CCTAATGAGAGCATAGATGATGAACATTTGTTAATCCAGCATTACTGCCAAAGTTTGAACCAGGACTCCCCCCTG
AGCCAGCCTCGTAGT
Human sequences with codon optimization:
(SEQ ID NO: 117)
ATGGCCAAGTACGGCGAGCACGAGGCCAGCCCCGACAACGGCCAGAACGAGTTCAGCGACATCATCAAGAGCCGG
AGCGACGAGCACAACGACGTGCAGAAGAAGACCTTCACCAAGTGGATCAACGCCCGGTTCAGCAAGAGCGGCAAG
CCCCCCATCAACGACATGTTCACCGACCTGAAGGACGGCCGGAAGCTGCTGGACCTGCTGGAGGGCCTGACCGGC
ACCAGCCTGCCCAAGGAGCGGGGCAGCACCCGGGTGCACGCCCTGAACAACGTGAACCGGGTGCTGCAGGTGCTG
CACCAGAACAACGTGGAGCTGGTGAACATCGGCGGCACCGACATCGTGGACGGCAACCACAAGCTGACCCTGGGC
CTGCTGTGGAGCATCATCCTGCACTGGCAGGTGAAGGACGTGATGAAGGACGTGATGAGCGACCTGCAGCAGACC
AACAGCGAGAAGATCCTGCTGAGCTGGGTGCGGCAGACCACCCGGCCCTACAGCCAGGTGAACGTGCTGAACTTC
ACCACCAGCTGGACCGACGGCCTGGCCTTCAACGCCGTGCTGCACCGGCACAAGCCCGACCTGTTCAGCTGGGAC
AAGGTGGTGAAGATGAGCCCCATCGAGCGGCTGGAGCACGCCTTCAGCAAGGCCCAGACCTACCTGGGCATCGAG
AAGCTGCTGGACCCCGAGGACGTGGCCGTGCAGCTGCCCGACAAGAAGAGCATCATCATGTACCTGACCAGCCTG
TTCGAGGTGCTGCCCCAGCAGGTGACCATCGACGCCATCCGGGAGGTGGAGACCCTGCCCCGGAAGTACAAGAAG
GAGTGCGAGGAGGAGGCCATCAACATCCAGAGCACCGCCCCCGAGGAGGAGCACGAGAGCCCCCGGGCCGAGACC
CCCAGCACCGTGACCGAGGTGGACATGGACCTGGACAGCTACCAGATCGCCCTGGAGGAGGTGCTGACCTGGCTG
CTGAGCGCCGAGGACACCTTCCAGGAGCAGGACGACATCAGCGACGACGTGGAGGAGGTGAAGGACCAGTTCGCC
ACCCACGAGGCCTTCATGATGGAGCTGACCGCCCACCAGAGCAGCGTGGGCAGCGTGCTGCAGGCCGGCAACCAG
CTGATCACCCAGGGCACCCTGAGCGACGAGGAGGAGTTCGAGATCCAGGAGCAGATGACCCTGCTGAACGCCCGG
TGGGAGGCCCTGCGGGTGGAGAGCATGGACCGGCAGAGCCGGCTGCACGACGTGCTGATGGAGCTGCAGAAGAAG
CAGCTGCAGCAGCTGAGCGCCTGGCTGACCCTGACCGAGGAGCGGATCCAGAAGATGGAGACCTGCCCCCTGGAC
GACGACGTGAAGAGCCTGCAGAAGCTGCTGGAGGAGCACAAGAGCCTGCAGAGCGACCTGGAGGCCGAGCAGGTG
AAGGTGAACAGCCTGACCCACATGGTGGTGATCGTGGACGAGAACAGCGGCGAGAGCGCCACCGCCATCCTGGAG
GACCAGCTGCAGAAGCTGGGCGAGCGGTGGACCGCCGTGTGCCGGTGGACCGAGGAGCGGTGGAACCGGCTGCAG
GAGATCAACATCCTGTGGCAGGAGCTGCTGGAGGAGCAGTGCCTGCTGAAGGCCTGGCTGACCGAGAAGGAGGAG
GCCCTGAACAAGGTGCAGACCAGCAACTTCAAGGACCAGAAGGAGCTGAGCGTGAGCGTGCGGCGGCTGGCCATC
CTGAAGGAGGACATGGAGATGAAGCGGCAGACCCTGGACCAGCTGAGCGAGATCGGCCAGGACGTGGGCCAGCTG
CTGGACAACAGCAAGGCCAGCAAGAAGATCAACAGCGACAGCGAGGAGCTGACCCAGCGGTGGGACAGCCTGGTG
CAGCGGCTGGAGGACAGCAGCAACCAGGTGACCCAGGCCGCCGCTAGCGCCAGCAGCGACCAGTGGAAGCGGCTG
CACCTGAGCCTGCAGGAGCTGCTGGTGTGGCTGCAGCTGAAGGACGACGAGCTGAGCCGGCAGGCCCCCATCGGC
GGCGACTTCCCCGCCGTGCAGAAGCAGAACGACGTGCACCGGGCCTTCAAGCGGGAGCTGAAGACCAAGGAGCCC
GTGATCATGAGCACCCTGGAGACCGTGCGGATCTTCCTGACCGAGCAGCCCCTGGAGGGCCTGGAGAAGCTGTAC
CAGGAGCCCCGGGAGCTGCCCCCCGAGGAGCGGGCCCAGAACGTGACCCGGCTGCTGCGGAAGCAGGCCGAGGAG
GTGAACACCGAGTGGGAGAAGCTGAACCTGCACAGCGCCGACTGGCAGCGGAAGATCGACGAGACCCTGGAGCGG
CTGCAGGAGCTGCAGGAGGCCACCGACGAGCTGGACCTGAAGCTGCGGCAGGCCGAGGTGATCAAGGGCAGCTGG
CAGCCCGTGGGCGACCTGCTGATCGACAGCCTGCAGGACCACCTGGAGAAGGTGAAGGCCCTGCGGGGCGAGATC
GCCCCCCTGAAGGAGAACGTGAGCCACGTGAACGACCTGGCCCGGCAGCTGACCACCCTGGGCATCCAGCTGAGC
CCCTACAACCTGAGCACCCTGGAGGACCTGAACACCCGGTGGAAGCTGCTGCAGGTGGCCGTGGAGGACCGGGTG
CGGCAGCTGCACGAGGCCCACCGGGACTTCGGCCCCGCCAGCCAGCACTTCCTGAGCACCAGCGTGCAGGGCCCC
TGGGAGCGGGCCATCAGCCCCAACAAGGTGCCCTACTACATCAACCACGAGACCCAGACCACCTGCTGGGACCAC
CCCAAGATGACCGAGCTGTACCAGAGCCTGGCCGACCTGAACAACGTGCGGTTCAGCGCCTACCGGACCGCCATG
AAGCTGCGGCGGCTGCAGAAGGCCCTGTGCCTGGACCTGCTGAGCCTGAGCGCCGCCTGCGACGCCCTGGACCAG
CACAACCTGAAGCAGAACGACCAGCCCATGGACATCCTGCAGATCATCAACTGCCTGACCACCATCTACGACCGG
CTGGAGCAGGAGCACAACAACCTGGTGAACGTGCCCCTGTGCGTGGACATGTGCCTGAACTGGCTGCTGAACGTG
TACGACACCGGCCGGACCGGCCGGATCCGGGTGCTGAGCTTCAAGACCGGCATCATCAGCCTGTGCAAGGCCCAC
CTGGAGGACAAGTACCGGTACCTGTTCAAGCAGGTGGCCAGCAGCACCGGCTTCTGCGACCAGCGGCGGCTGGGC
CTGCTGCTGCACGACAGCATCCAGATCCCCCGGCAGCTGGGCGAGGTGGCCAGCTTCGGCGGCAGCAACATCGAG
CCCAGCGTGCGGAGCTGCTTCCAGTTCGCCAACAACAAGCCCGAGATCGAGGCCGCCCTGTTCCTGGACTGGATG
CGGCTGGAGCCCCAGAGCATGGTGTGGCTGCCCGTGCTGCACCGGGTGGCCGCCGCCGAGACCGCCAAGCACCAG
GCCAAGTGCAACATCTGCAAGGAGTGCCCCATCATCGGCTTCCGGTACCGGAGCCTGAAGCACTTCAACTACGAC
ATCTGCCAGAGCTGCTTCTTCAGCGGCCGGGTGGCCAAGGGCCACAAGATGCACTACCCCATGGTGGAGTACTGC
ACCCCCACCACCAGCGGCGAGGACGTGCGGGACTTCGCCAAGGTGCTGAAGAACAAGTTCCGGACCAAGCGGTAC
TTCGCCAAGCACCCCCGGATGGGCTACCTGCCCGTGCAGACCGTGCTGGAGGGCGACAACATGGAGACCCCCGTG
ACCCTGATCAACTTCTGGCCCGTGGACAGCGCCCCCGCCAGCAGCCCCCAGCTGAGCCACGACGACACCCACAGC
CGGATCGAGCACTACGCCAGCCGGCTGGCCGAGATGGAGAACAGCAACGGCAGCTACCTGAACGACAGCATCAGC
CCCAACGAGAGCATCGACGACGAGCACCTGCTGATCCAGCACTACTGCCAGAGCCTGAACCAGGACAGCCCCCTG
AGCCAGCCCCGGAGC
Utrophin N-terminus through R2_Dystrophin R23 to end:
Human sequences without codon alterations:
(SEQ ID NO: 118)
ATGGCCAAGTATGGAGAACATGAAGCCAGTCCTGACAATGGGCAGAACGAATTCAGTGATATCATTAAGTCCAGA
TCTGATGAACACAATGACGTACAGAAGAAAACCTTTACCAAATGGATAAATGCTCGATTTTCAAAGAGTGGGAAA
CCACCCATCAATGATATGTTCACAGACCTCAAAGATGGAAGGAAGCTATTGGATCTTCTAGAAGGCCTCACAGGA
ACATCACTGCCAAAGGAACGTGGTTCCACAAGGGTACATGCCTTAAATAACGTCAACAGAGTGCTGCAGGTTTTA
CATCAGAACAATGTGGAATTAGTGAATATAGGGGGAACTGACATTGTGGATGGAAATCACAAACTGACTTTGGGG
TTACTTTGGAGCATCATTTTGCACTGGCAGGTGAAAGATGTCATGAAGGATGTCATGTCGGACCTGCAGCAGACG
AACAGTGAGAAGATCCTGCTCAGCTGGGTGCGTCAGACCACCAGGCCCTACAGCCAAGTCAACGTCCTCAACTTC
ACCACCAGCTGGACAGATGGACTCGCCTTTAATGCTGTCCTCCACCGACATAAACCTGATCTCTTCAGCTGGGAT
AAAGTTGTCAAAATGTCACCAATTGAGAGACTTGAACATGCCTTCAGCAAGGCTCAAACTTATTTGGGAATTGAA
AAGCTGTTAGATCCTGAAGATGTTGCCGTTCAGCTTCCTGACAAGAAATCCATAATTATGTATTTAACATCTTTG
TTTGAGGTGCTACCTCAGCAAGTCACCATAGACGCCATCCGTGAGGTAGAGACACTCCCAAGGAAATATAAAAAA
GAATGTGAAGAAGAGGCAATTAATATACAGAGTACAGCGCCTGAGGAGGAGCATGAGAGTCCCCGAGCTGAAACT
CCCAGCACTGTCACTGAGGTTGACATGGATCTGGACAGCTATCAGATTGCGTTGGAGGAAGTGCTGACCTGGTTG
CTTTCTGCTGAGGACACTTTCCAGGAGCAGGATGATATTTCTGATGATGTTGAAGAAGTCAAAGACCAGTTTGCA
ACCCATGAAGCTTTTATGATGGAACTGACTGCACACCAGAGCAGTGTGGGCAGCGTCCTGCAGGCAGGCAACCAA
CTGATAACACAAGGAACTCTGTCAGACGAAGAAGAATTTGAGATTCAGGAACAGATGACCCTGCTGAATGCTAGA
TGGGAGGCTCTTAGGGTGGAGAGTATGGACAGACAGTCCCGGCTGCACGATGTGCTGATGGAACTGCAGAAGAAG
CAACTGCAGCAGCTCTCCGCCTGGTTAACACTCACAGAGGAGCGCATTCAGAAGATGGAAACTTGCCCCCTGGAT
GATGATGTAAAATCTCTACAAAAGCTGCTAGAAGAACATAAAAGTTTGCAAAGTGATCTTGAGGCTGAACAGGTG
AAAGTAAATTCACTAACTCACATGGTGGTCATTGTTGATGAAAACAGTGGTGAGAGTGCTACAGCTATCCTAGAA
GACCAGTTACAGAAACTTGGTGAGCGCTGGACAGCAGTATGCCGTTGGACTGAAGAACGCTGGAATAGGTTACAA
GAAATCGCCGCTAGCGCCAGTTCTGACCAGTGGAAGCGTCTGCACCTTTCTCTGCAGGAACTTCTGGTGTGGCTA
CAGCTGAAAGATGATGAATTAAGCCGGCAGGCACCTATTGGAGGCGACTTTCCAGCAGTTCAGAAGCAGAACGAT
GTACATAGGGCCTTCAAGAGGGAATTGAAAACTAAAGAACCTGTAATCATGAGTACTCTTGAGACTGTACGAATA
TTTCTGACAGAGCAGCCTTTGGAAGGACTAGAGAAACTCTACCAGGAGCCCAGAGAGCTGCCTCCTGAGGAGAGA
GCCCAGAATGTCACTCGGCTTCTACGAAAGCAGGCTGAGGAGGTCAATACTGAGTGGGAAAAATTGAACCTGCAC
TCCGCTGACTGGCAGAGAAAAATAGATGAGACCCTTGAAAGACTCCGGGAACTTCAAGAGGCCACGGATGAGCTG
GACCTCAAGCTGCGCCAAGCTGAGGTGATCAAGGGATCCTGGCAGCCCGTGGGCGATCTCCTCATTGACTCTCTC
CAAGATCACCTCGAGAAAGTCAAGGCACTTCGAGGAGAAATTGCGCCTCTGAAAGAGAACGTGAGCCACGTCAAT
GACCTTGCTCGCCAGCTTACCACTTTGGGCATTCAGCTCTCACCGTATAACCTCAGCACTCTGGAAGACCTGAAC
ACCAGATGGAAGCTTCTGCAGGTGGCCGTCGAGGACCGAGTCAGGCAGCTGCATGAAGCCCACAGGGACTTTGGT
CCAGCATCTCAGCACTTTCTTTCCACGTCTGTCCAGGGTCCCTGGGAGAGAGCCATCTCGCCAAACAAAGTGCCC
TACTATATCAACCACGAGACTCAAACAACTTGCTGGGACCATCCCAAAATGACAGAGCTCTACCAGTCTTTAGCT
GACCTGAATAATGTCAGATTCTCAGCTTATAGGACTGCCATGAAACTCCGAAGACTGCAGAAGGCCCTTTGCTTG
GATCTCTTGAGCCTGTCAGCTGCATGTGATGCCTTGGACCAGCACAACCTCAAGCAAAATGACCAGCCCATGGAT
ATCCTGCAGATTATTAATTGTTTGACCACTATTTATGACCGCCTGGAGCAAGAGCACAACAATTTGGTCAACGTC
CCTCTCTGCGTGGATATGTGTCTGAACTGGCTGCTGAATGTTTATGATACGGGACGAACAGGGAGGATCCGTGTC
CTGTCTTTTAAAACTGGCATCATTTCCCTGTGTAAAGCACATTTGGAAGACAAGTACAGATACCTTTTCAAGCAA
GTGGCAAGTTCAACAGGATTTTGTGACCAGCGCAGGCTGGGCCTCCTTCTGCATGATTCTATCCAAATTCCAAGA
CAGTTGGGTGAAGTTGCATCCTTTGGGGGCAGTAACATTGAGCCAAGTGTCCGGAGCTGCTTCCAATTTGCTAAT
AATAAGCCAGAGATCGAAGCGGCCCTCTTCCTAGACTGGATGAGACTGGAACCCCAGTCCATGGTGTGGCTGCCC
GTCCTGCACAGAGTGGCTGCTGCAGAAACTGCCAAGCATCAGGCCAAATGTAACATCTGCAAAGAGTGTCCAATC
ATTGGATTCAGGTACAGGAGTCTAAAGCACTTTAATTATGACATCTGCCAAAGCTGCTTTTTTTCTGGTCGAGTT
GCAAAAGGCCATAAAATGCACTATCCCATGGTGGAATATTGCACTCCGACTACATCAGGAGAAGATGTTCGAGAC
TTTGCCAAGGTACTAAAAAACAAATTTCGAACCAAAAGGTATTTTGCGAAGCATCCCCGAATGGGCTACCTGCCA
GTGCAGACTGTCTTAGAGGGGGACAACATGGAAACTCCCGTTACTCTGATCAACTTCTGGCCAGTAGATTCTGCG
CCTGCCTCGTCCCCTCAGCTTTCACACGATGATACTCATTCACGCATTGAACATTATGCTAGCAGGCTAGCAGAA
ATGGAAAACAGCAATGGATCTTATCTAAATGATAGCATCTCTCCTAATGAGAGCATAGATGATGAACATTTGTTA
ATCCAGCATTACTGCCAAAGTTTGAACCAGGACTCCCCCCTGAGCCAGCCTCGTAGTCCTGCCCAGATCTTGATT
TCCTTAGAGAGTGAGGAAAGAGGGGAGCTAGAGAGAATCCTAGCAGATCTTGAGGAAGAAAACAGGAATCTGCAA
GCAGAATATGACCGTCTAAAGCAGCAGCACGAACATAAAGGCCTGTCCCCACTGCCGTCCCCTCCTGAAATGATG
CCCACCTCTCCCCAGAGTCCCCGGGATGCTGAGCTCATTGCTGAGGCCAAGCTACTGCGTCAACACAAAGGCCGC
CTGGAAGCCAGGATGCAAATCCTGGAAGACCACAATAAACAGCTGGAGTCACAGTTACACAGGCTAAGGCAGCTG
CTGGAGCAACCCCAGGCAGAGGCCAAAGTGAATGGCACAACGGTGTCCTCTCCTTCTACCTCTCTACAGAGGTCC
GACAGCAGTCAGCCTATGCTGCTCCGAGTGGTTGGCAGTCAAACTTCGGACTCCATGGGTGAGGAAGATCTTCTC
AGTCCTCCCCAGGACACAAGCACAGGGTTAGAGGAGGTGATGGAGCAACTCAACAACTCCTTCCCTAGTTCAAGA
GGAAGAAATACCCCTGGAAAGCCAATGAGAGAGGACACAATG
Human sequences with codon optimization:
(SEQ ID NO: 119)
ATGGCCAAGTACGGCGAGCACGAGGCCAGCCCCGACAACGGCCAGAACGAGTTCAGCGACATCATCAAGAGCCGG
AGCGACGAGCACAACGACGTGCAGAAGAAGACCTTCACCAAGTGGATCAACGCCCGGTTCAGCAAGAGCGGCAAG
CCCCCCATCAACGACATGTTCACCGACCTGAAGGACGGCCGGAAGCTGCTGGACCTGCTGGAGGGCCTGACCGGC
ACCAGCCTGCCCAAGGAGCGGGGCAGCACCCGGGTGCACGCCCTGAACAACGTGAACCGGGTGCTGCAGGTGCTG
CACCAGAACAACGTGGAGCTGGTGAACATCGGCGGCACCGACATCGTGGACGGCAACCACAAGCTGACCCTGGGC
CTGCTGTGGAGCATCATCCTGCACTGGCAGGTGAAGGACGTGATGAAGGACGTGATGAGCGACCTGCAGCAGACC
AACAGCGAGAAGATCCTGCTGAGCTGGGTGCGGCAGACCACCCGGCCCTACAGCCAGGTGAACGTGCTGAACTTC
ACCACCAGCTGGACCGACGGCCTGGCCTTCAACGCCGTGCTGCACCGGCACAAGCCCGACCTGTTCAGCTGGGAC
AAGGTGGTGAAGATGAGCCCCATCGAGCGGCTGGAGCACGCCTTCAGCAAGGCCCAGACCTACCTGGGCATCGAG
AAGCTGCTGGACCCCGAGGACGTGGCCGTGCAGCTGCCCGACAAGAAGAGCATCATCATGTACCTGACCAGCCTG
TTCGAGGTGCTGCCCCAGCAGGTGACCATCGACGCCATCCGGGAGGTGGAGACCCTGCCCCGGAAGTACAAGAAG
GAGTGCGAGGAGGAGGCCATCAACATCCAGAGCACCGCCCCCGAGGAGGAGCACGAGAGCCCCCGGGCCGAGACC
CCCAGCACCGTGACCGAGGTGGACATGGACCTGGACAGCTACCAGATCGCCCTGGAGGAGGTGCTGACCTGGCTG
CTGAGCGCCGAGGACACCTTCCAGGAGCAGGACGACATCAGCGACGACGTGGAGGAGGTGAAGGACCAGTTCGCC
ACCCACGAGGCCTTCATGATGGAGCTGACCGCCCACCAGAGCAGCGTGGGCAGCGTGCTGCAGGCCGGCAACCAG
CTGATCACCCAGGGCACCCTGAGCGACGAGGAGGAGTTCGAGATCCAGGAGCAGATGACCCTGCTGAACGCCCGG
TGGGAGGCCCTGCGGGTGGAGAGCATGGACCGGCAGAGCCGGCTGCACGACGTGCTGATGGAGCTGCAGAAGAAG
CAGCTGCAGCAGCTGAGCGCCTGGCTGACCCTGACCGAGGAGCGGATCCAGAAGATGGAGACCTGCCCCCTGGAC
GACGACGTGAAGAGCCTGCAGAAGCTGCTGGAGGAGCACAAGAGCCTGCAGAGCGACCTGGAGGCCGAGCAGGTG
AAGGTGAACAGCCTGACCCACATGGTGGTGATCGTGGACGAGAACAGCGGCGAGAGCGCCACCGCCATCCTGGAG
GACCAGCTGCAGAAGCTGGGCGAGCGGTGGACCGCCGTGTGCCGGTGGACCGAGGAGCGGTGGAACCGGCTGCAG
GAGATCGCCGCTAGCGCCAGCAGCGACCAGTGGAAGCGGCTGCACCTGAGCCTGCAGGAGCTGCTGGTGTGGCTG
CAGCTGAAGGACGACGAGCTGAGCCGGCAGGCCCCCATCGGCGGCGACTTCCCCGCCGTGCAGAAGCAGAACGAC
GTGCACCGGGCCTTCAAGCGGGAGCTGAAGACCAAGGAGCCCGTGATCATGAGCACCCTGGAGACCGTGCGGATC
TTCCTGACCGAGCAGCCCCTGGAGGGCCTGGAGAAGCTGTACCAGGAGCCCCGGGAGCTGCCCCCCGAGGAGCGG
GCCCAGAACGTGACCCGGCTGCTGCGGAAGCAGGCCGAGGAGGTGAACACCGAGTGGGAGAAGCTGAACCTGCAC
AGCGCCGACTGGCAGAGAAAAATAGATGAGACCCTTGAAAGACTCCGGGAACTTCAAGAGGCCACGGATGAGCTG
GACCTCAAGCTGCGCCAAGCTGAGGTGATCAAGGGATCCTGGCAGCCCGTGGGCGATCTCCTCATTGACTCTCTC
CAAGATCACCTCGAGAAAGTCAAGGCACTTCGAGGAGAAATTGCGCCTCTGAAAGAGAACGTGAGCCACGTCAAT
GACCTTGCTCGCCAGCTTACCACTTTGGGCATTCAGCTCTCACCGTATAACCTCAGCACTCTGGAAGACCTGAAC
ACCAGATGGAAGCTTCTGCAGGTGGCCGTCGAGGACCGAGTCAGGCAGCTGCATGAAGCCCACAGGGACTTTGGT
CCAGCATCTCAGCACTTTCTTTCCACGTCTGTCCAGGGTCCCTGGGAGAGAGCCATCTCGCCAAACAAAGTGCCC
TACTATATCAACCACGAGACTCAAACAACTTGCTGGGACCATCCCAAAATGACAGAGCTCTACCAGTCTTTAGCT
GACCTGAATAATGTCAGATTCTCAGCTTATAGGACTGCCATGAAACTCCGAAGACTGCAGAAGGCCCTTTGCTTG
GATCTCTTGAGCCTGTCAGCTGCATGTGATGCCTTGGACCAGCACAACCTCAAGCAAAATGACCAGCCCATGGAT
ATCCTGCAGATTATTAATTGTTTGACCACTATTTATGACCGCCTGGAGCAAGAGCACAACAATTTGGTCAACGTC
CCTCTCTGCGTGGATATGTGTCTGAACTGGCTGCTGAATGTTTATGATACGGGACGAACAGGGAGGATCCGTGTC
CTGTCTTTTAAAACTGGCATCATTTCCCTGTGTAAAGCACATTTGGAAGACAAGTACAGATACCTTTTCAAGCAA
GTGGCAAGTTCAACAGGATTTTGTGACCAGCGCAGGCTGGGCCTCCTTCTGCATGATTCTATCCAAATTCCAAGA
CAGTTGGGTGAAGTTGCATCCTTTGGGGGCAGTAACATTGAGCCAAGTGTCCGGAGCTGCTTCCAATTTGCTAAT
AATAAGCCAGAGATCGAAGCGGCCCTCTTCCTAGACTGGATGAGACTGGAACCCCAGTCCATGGTGTGGCTGCCC
GTCCTGCACAGAGTGGCTGCTGCAGAAACTGCCAAGCATCAGGCCAAATGTAACATCTGCAAAGAGTGTCCAATC
ATTGGATTCAGGTACAGGAGTCTAAAGCACTTTAATTATGACATCTGCCAAAGCTGCTTTTTTTCTGGTCGAGTT
GCAAAAGGCCATAAAATGCACTATCCCATGGTGGAATATTGCACTCCGACTACATCAGGAGAAGATGTTCGAGAC
TTTGCCAAGGTACTAAAAAACAAATTTCGAACCAAAAGGTATTTTGCGAAGCATCCCCGAATGGGCTACCTGCCA
GTGCAGACTGTCTTAGAGGGGGACAACATGGAAACTCCCGTTACTCTGATCAACTTCTGGCCAGTAGATTCTGCG
CCTGCCTCGTCCCCTCAGCTTTCACACGATGATACTCATTCACGCATTGAACATTATGCTAGCAGGCTAGCAGAA
ATGGAAAACAGCAATGGATCTTATCTAAATGATAGCATCTCTCCTAATGAGAGCATAGATGATGAACATTTGTTA
ATCCAGCATTACTGCCAAAGTTTGAACCAGGACTCCCCCCTGAGCCAGCCTCGTAGTCCTGCCCAGATCTTGATT
TCCTTAGAGAGTGAGGAAAGAGGGGAGCTAGAGAGAATCCTAGCAGATCTTGAGGAAGAAAACAGGAATCTGCAA
GCAGAATATGACCGTCTAAAGCAGCAGCACGAACATAAAGGCCTGTCCCCACTGCCGTCCCCTCCTGAAATGATG
CCCACCTCTCCCCAGAGTCCCCGGGATGCTGAGCTCATTGCTGAGGCCAAGCTACTGCGTCAACACAAAGGCCGC
CTGGAAGCCAGGATGCAAATCCTGGAAGACCACAATAAACAGCTGGAGTCACAGTTACACAGGCTAAGGCAGCTG
CTGGAGCAACCCCAGGCAGAGGCCAAAGTGAATGGCACAACGGTGTCCTCTCCTTCTACCTCTCTACAGAGGTCC
GACAGCAGTCAGCCTATGCTGCTCCGAGTGGTTGGCAGTCAAACTTCGGACTCCATGGGTGAGGAAGATCTTCTC
AGTCCTCCCCAGGACACAAGCACAGGGTTAGAGGAGGTGATGGAGCAACTCAACAACTCCTTCCCTAGTTCAAGA
GGAAGAAATACCCCTGGAAAGCCAATGAGAGAGGACACAATG
Utrophin N-terminus through R3_Dystrophin R24 to end:
Human sequences without codon alterations:
(SEQ ID NO: 135)
ATGGCCAAGTATGGAGAACATGAAGCCAGTCCTGACAATGGGCAGAACGAATTCAGTGATATCATTAAGTCCAGA
TCTGATGAACACAATGACGTACAGAAGAAAACCTTTACCAAATGGATAAATGCTCGATTTTCAAAGAGTGGGAAA
CCACCCATCAATGATATGTTCACAGACCTCAAAGATGGAAGGAAGCTATTGGATCTTCTAGAAGGCCTCACAGGA
ACATCACTGCCAAAGGAACGTGGTTCCACAAGGGTACATGCCTTAAATAACGTCAACAGAGTGCTGCAGGTTTTA
CATCAGAACAATGTGGAATTAGTGAATATAGGGGGAACTGACATTGTGGATGGAAATCACAAACTGACTTTGGGG
TTACTTTGGAGCATCATTTTGCACTGGCAGGTGAAAGATGTCATGAAGGATGTCATGTCGGACCTGCAGCAGACG
AACAGTGAGAAGATCCTGCTCAGCTGGGTGCGTCAGACCACCAGGCCCTACAGCCAAGTCAACGTCCTCAACTTC
ACCACCAGCTGGACAGATGGACTCGCCTTTAATGCTGTCCTCCACCGACATAAACCTGATCTCTTCAGCTGGGAT
AAAGTTGTCAAAATGTCACCAATTGAGAGACTTGAACATGCCTTCAGCAAGGCTCAAACTTATTTGGGAATTGAA
AAGCTGTTAGATCCTGAAGATGTTGCCGTTCAGCTTCCTGACAAGAAATCCATAATTATGTATTTAACATCTTTG
TTTGAGGTGCTACCTCAGCAAGTCACCATAGACGCCATCCGTGAGGTAGAGACACTCCCAAGGAAATATAAAAAA
GAATGTGAAGAAGAGGCAATTAATATACAGAGTACAGCGCCTGAGGAGGAGCATGAGAGTCCCCGAGCTGAAACT
CCCAGCACTGTCACTGAGGTTGACATGGATCTGGACAGCTATCAGATTGCGTTGGAGGAAGTGCTGACCTGGTTG
CTTTCTGCTGAGGACACTTTCCAGGAGCAGGATGATATTTCTGATGATGTTGAAGAAGTCAAAGACCAGTTTGCA
ACCCATGAAGCTTTTATGATGGAACTGACTGCACACCAGAGCAGTGTGGGCAGCGTCCTGCAGGCAGGCAACCAA
CTGATAACACAAGGAACTCTGTCAGACGAAGAAGAATTTGAGATTCAGGAACAGATGACCCTGCTGAATGCTAGA
TGGGAGGCTCTTAGGGTGGAGAGTATGGACAGACAGTCCCGGCTGCACGATGTGCTGATGGAACTGCAGAAGAAG
CAACTGCAGCAGCTCTCCGCCTGGTTAACACTCACAGAGGAGCGCATTCAGAAGATGGAAACTTGCCCCCTGGAT
GATGATGTAAAATCTCTACAAAAGCTGCTAGAAGAACATAAAAGTTTGCAAAGTGATCTTGAGGCTGAACAGGTG
AAAGTAAATTCACTAACTCACATGGTGGTCATTGTTGATGAAAACAGTGGTGAGAGTGCTACAGCTATCCTAGAA
GACCAGTTACAGAAACTTGGTGAGCGCTGGACAGCAGTATGCCGTTGGACTGAAGAACGCTGGAATAGGTTACAA
GAAATCAATATATTGTGGCAGGAATTATTGGAAGAACAGTGCTTGTTGAAAGCTTGGTTAACCGAAAAAGAAGAG
GCTTTAAATAAAGTCCAGACAAGCAACTTCAAAGACCAAAAGGAACTAAGTGTCAGTGTTCGACGTCTGGCTATT
TTGAAGGAAGACATGGAAATGAAGCGTCAAACATTGGATCAGCTGAGTGAGATTGGCCAGGATGTGGGACAATTA
CTTGATAATTCCAAGGCATCTAAGAAGATCAACAGTGACTCAGAGGAACTGACTCAAAGATGGGATTCTTTGGTT
CAGAGACTAGAAGATTCCTCCAACCAGGTGACTCAGGCTCAGAGAAAAATAGATGAGACCCTTGAAAGACTCCGG
GAACTTCAAGAGGCCACGGATGAGCTGGACCTCAAGCTGCGCCAAGCTGAGGTGATCAAGGGATCCTGGCAGCCC
GTGGGCGATCTCCTCATTGACTCTCTCCAAGATCACCTCGAGAAAGTCAAGGCACTTCGAGGAGAAATTGCGCCT
CTGAAAGAGAACGTGAGCCACGTCAATGACCTTGCTCGCCAGCTTACCACTTTGGGCATTCAGCTCTCACCGTAT
AACCTCAGCACTCTGGAAGACCTGAACACCAGATGGAAGCTTCTGCAGGTGGCCGTCGAGGACCGAGTCAGGCAG
CTGCATGAAGCCCACAGGGACTTTGGTCCAGCATCTCAGCACTTTCTTTCCACGTCTGTCCAGGGTCCCTGGGAG
AGAGCCATCTCGCCAAACAAAGTGCCCTACTATATCAACCACGAGACTCAAACAACTTGCTGGGACCATCCCAAA
ATGACAGAGCTCTACCAGTCTTTAGCTGACCTGAATAATGTCAGATTCTCAGCTTATAGGACTGCCATGAAACTC
CGAAGACTGCAGAAGGCCCTTTGCTTGGATCTCTTGAGCCTGTCAGCTGCATGTGATGCCTTGGACCAGCACAAC
CTCAAGCAAAATGACCAGCCCATGGATATCCTGCAGATTATTAATTGTTTGACCACTATTTATGACCGCCTGGAG
CAAGAGCACAACAATTTGGTCAACGTCCCTCTCTGCGTGGATATGTGTCTGAACTGGCTGCTGAATGTTTATGAT
ACGGGACGAACAGGGAGGATCCGTGTCCTGTCTTTTAAAACTGGCATCATTTCCCTGTGTAAAGCACATTTGGAA
GACAAGTACAGATACCTTTTCAAGCAAGTGGCAAGTTCAACAGGATTTTGTGACCAGCGCAGGCTGGGCCTCCTT
CTGCATGATTCTATCCAAATTCCAAGACAGTTGGGTGAAGTTGCATCCTTTGGGGGCAGTAACATTGAGCCAAGT
GTCCGGAGCTGCTTCCAATTTGCTAATAATAAGCCAGAGATCGAAGCGGCCCTCTTCCTAGACTGGATGAGACTG
GAACCCCAGTCCATGGTGTGGCTGCCCGTCCTGCACAGAGTGGCTGCTGCAGAAACTGCCAAGCATCAGGCCAAA
TGTAACATCTGCAAAGAGTGTCCAATCATTGGATTCAGGTACAGGAGTCTAAAGCACTTTAATTATGACATCTGC
CAAAGCTGCTTTTTTTCTGGTCGAGTTGCAAAAGGCCATAAAATGCACTATCCCATGGTGGAATATTGCACTCCG
ACTACATCAGGAGAAGATGTTCGAGACTTTGCCAAGGTACTAAAAAACAAATTTCGAACCAAAAGGTATTTTGCG
AAGCATCCCCGAATGGGCTACCTGCCAGTGCAGACTGTCTTAGAGGGGGACAACATGGAAACTCCCGTTACTCTG
ATCAACTTCTGGCCAGTAGATTCTGCGCCTGCCTCGTCCCCTCAGCTTTCACACGATGATACTCATTCACGCATT
GAACATTATGCTAGCAGGCTAGCAGAAATGGAAAACAGCAATGGATCTTATCTAAATGATAGCATCTCTCCTAAT
GAGAGCATAGATGATGAACATTTGTTAATCCAGCATTACTGCCAAAGTTTGAACCAGGACTCCCCCCTGAGCCAG
CCTCGTAGTCCTGCCCAGATCTTGATTTCCTTAGAGAGTGAGGAAAGAGGGGAGCTAGAGAGAATCCTAGCAGAT
CTTGAGGAAGAAAACAGGAATCTGCAAGCAGAATATGACCGTCTAAAGCAGCAGCACGAACATAAAGGCCTGTCC
CCACTGCCGTCCCCTCCTGAAATGATGCCCACCTCTCCCCAGAGTCCCCGGGATGCTGAGCTCATTGCTGAGGCC
AAGCTACTGCGTCAACACAAAGGCCGCCTGGAAGCCAGGATGCAAATCCTGGAAGACCACAATAAACAGCTGGAG
TCACAGTTACACAGGCTAAGGCAGCTGCTGGAGCAACCCCAGGCAGAGGCCAAAGTGAATGGCACAACGGTGTCC
TCTCCTTCTACCTCTCTACAGAGGTCCGACAGCAGTCAGCCTATGCTGCTCCGAGTGGTTGGCAGTCAAACTTCG
GACTCCATGGGTGAGGAAGATCTTCTCAGTCCTCCCCAGGACACAAGCACAGGGTTAGAGGAGGTGATGGAGCAA
CTCAACAACTCCTTCCCTAGTTCAAGAGGAAGAAATACCCCTGGAAAGCCAATGAGAGAGGACACAATG
Human sequences with codon optimization:
(SEQ ID NO: 136)
ATGGCCAAGTACGGCGAGCACGAGGCCAGCCCCGACAACGGCCAGAACGAGTTCAGCGACATCATCAAGAGCCGG
AGCGACGAGCACAACGACGTGCAGAAGAAGACCTTCACCAAGTGGATCAACGCCCGGTTCAGCAAGAGCGGCAAG
CCCCCCATCAACGACATGTTCACCGACCTGAAGGACGGCCGGAAGCTGCTGGACCTGCTGGAGGGCCTGACCGGC
ACCAGCCTGCCCAAGGAGCGGGGCAGCACCCGGGTGCACGCCCTGAACAACGTGAACCGGGTGCTGCAGGTGCTG
CACCAGAACAACGTGGAGCTGGTGAACATCGGCGGCACCGACATCGTGGACGGCAACCACAAGCTGACCCTGGGC
CTGCTGTGGAGCATCATCCTGCACTGGCAGGTGAAGGACGTGATGAAGGACGTGATGAGCGACCTGCAGCAGACC
AACAGCGAGAAGATCCTGCTGAGCTGGGTGCGGCAGACCACCCGGCCCTACAGCCAGGTGAACGTGCTGAACTTC
ACCACCAGCTGGACCGACGGCCTGGCCTTCAACGCCGTGCTGCACCGGCACAAGCCCGACCTGTTCAGCTGGGAC
AAGGTGGTGAAGATGAGCCCCATCGAGCGGCTGGAGCACGCCTTCAGCAAGGCCCAGACCTACCTGGGCATCGAG
AAGCTGCTGGACCCCGAGGACGTGGCCGTGCAGCTGCCCGACAAGAAGAGCATCATCATGTACCTGACCAGCCTG
TTCGAGGTGCTGCCCCAGCAGGTGACCATCGACGCCATCCGGGAGGTGGAGACCCTGCCCCGGAAGTACAAGAAG
GAGTGCGAGGAGGAGGCCATCAACATCCAGAGCACCGCCCCCGAGGAGGAGCACGAGAGCCCCCGGGCCGAGACC
CCCAGCACCGTGACCGAGGTGGACATGGACCTGGACAGCTACCAGATCGCCCTGGAGGAGGTGCTGACCTGGCTG
CTGAGCGCCGAGGACACCTTCCAGGAGCAGGACGACATCAGCGACGACGTGGAGGAGGTGAAGGACCAGTTCGCC
ACCCACGAGGCCTTCATGATGGAGCTGACCGCCCACCAGAGCAGCGTGGGCAGCGTGCTGCAGGCCGGCAACCAG
CTGATCACCCAGGGCACCCTGAGCGACGAGGAGGAGTTCGAGATCCAGGAGCAGATGACCCTGCTGAACGCCCGG
TGGGAGGCCCTGCGGGTGGAGAGCATGGACCGGCAGAGCCGGCTGCACGACGTGCTGATGGAGCTGCAGAAGAAG
CAGCTGCAGCAGCTGAGCGCCTGGCTGACCCTGACCGAGGAGCGGATCCAGAAGATGGAGACCTGCCCCCTGGAC
GACGACGTGAAGAGCCTGCAGAAGCTGCTGGAGGAGCACAAGAGCCTGCAGAGCGACCTGGAGGCCGAGCAGGTG
AAGGTGAACAGCCTGACCCACATGGTGGTGATCGTGGACGAGAACAGCGGCGAGAGCGCCACCGCCATCCTGGAG
GACCAGCTGCAGAAGCTGGGCGAGCGGTGGACCGCCGTGTGCCGGTGGACCGAGGAGCGGTGGAACCGGCTGCAG
GAGATCAACATCCTGTGGCAGGAGCTGCTGGAGGAGCAGTGCCTGCTGAAGGCCTGGCTGACCGAGAAGGAGGAG
GCCCTGAACAAGGTGCAGACCAGCAACTTCAAGGACCAGAAGGAGCTGAGCGTGAGCGTGCGGCGGCTGGCCATC
CTGAAGGAGGACATGGAGATGAAGCGGCAGACCCTGGACCAGCTGAGCGAGATCGGCCAGGACGTGGGCCAGCTG
CTGGACAACAGCAAGGCCAGCAAGAAGATCAACAGCGACAGCGAGGAGCTGACCCAGCGGTGGGACAGCCTGGTG
CAGCGGCTGGAGGACAGCAGCAACCAGGTGACCCAGGCCGCCGCTAGCGCCCAGAGAAAAATAGATGAGACCCTT
GAAAGACTCCGGGAACTTCAAGAGGCCACGGATGAGCTGGACCTCAAGCTGCGCCAAGCTGAGGTGATCAAGGGA
TCCTGGCAGCCCGTGGGCGATCTCCTCATTGACTCTCTCCAAGATCACCTCGAGAAAGTCAAGGCACTTCGAGGA
GAAATTGCGCCTCTGAAAGAGAACGTGAGCCACGTCAATGACCTTGCTCGCCAGCTTACCACTTTGGGCATTCAG
CTCTCACCGTATAACCTCAGCACTCTGGAAGACCTGAACACCAGATGGAAGCTTCTGCAGGTGGCCGTCGAGGAC
CGAGTCAGGCAGCTGCATGAAGCCCACAGGGACTTTGGTCCAGCATCTCAGCACTTTCTTTCCACGTCTGTCCAG
GGTCCCTGGGAGAGAGCCATCTCGCCAAACAAAGTGCCCTACTATATCAACCACGAGACTCAAACAACTTGCTGG
GACCATCCCAAAATGACAGAGCTCTACCAGTCTTTAGCTGACCTGAATAATGTCAGATTCTCAGCTTATAGGACT
GCCATGAAACTCCGAAGACTGCAGAAGGCCCTTTGCTTGGATCTCTTGAGCCTGTCAGCTGCATGTGATGCCTTG
GACCAGCACAACCTCAAGCAAAATGACCAGCCCATGGATATCCTGCAGATTATTAATTGTTTGACCACTATTTAT
GACCGCCTGGAGCAAGAGCACAACAATTTGGTCAACGTCCCTCTCTGCGTGGATATGTGTCTGAACTGGCTGCTG
AATGTTTATGATACGGGACGAACAGGGAGGATCCGTGTCCTGTCTTTTAAAACTGGCATCATTTCCCTGTGTAAA
GCACATTTGGAAGACAAGTACAGATACCTTTTCAAGCAAGTGGCAAGTTCAACAGGATTTTGTGACCAGCGCAGG
CTGGGCCTCCTTCTGCATGATTCTATCCAAATTCCAAGACAGTTGGGTGAAGTTGCATCCTTTGGGGGCAGTAAC
ATTGAGCCAAGTGTCCGGAGCTGCTTCCAATTTGCTAATAATAAGCCAGAGATCGAAGCGGCCCTCTTCCTAGAC
TGGATGAGACTGGAACCCCAGTCCATGGTGTGGCTGCCCGTCCTGCACAGAGTGGCTGCTGCAGAAACTGCCAAG
CATCAGGCCAAATGTAACATCTGCAAAGAGTGTCCAATCATTGGATTCAGGTACAGGAGTCTAAAGCACTTTAAT
TATGACATCTGCCAAAGCTGCTTTTTTTCTGGTCGAGTTGCAAAAGGCCATAAAATGCACTATCCCATGGTGGAA
TATTGCACTCCGACTACATCAGGAGAAGATGTTCGAGACTTTGCCAAGGTACTAAAAAACAAATTTCGAACCAAA
AGGTATTTTGCGAAGCATCCCCGAATGGGCTACCTGCCAGTGCAGACTGTCTTAGAGGGGGACAACATGGAAACT
CCCGTTACTCTGATCAACTTCTGGCCAGTAGATTCTGCGCCTGCCTCGTCCCCTCAGCTTTCACACGATGATACT
CATTCACGCATTGAACATTATGCTAGCAGGCTAGCAGAAATGGAAAACAGCAATGGATCTTATCTAAATGATAGC
ATCTCTCCTAATGAGAGCATAGATGATGAACATTTGTTAATCCAGCATTACTGCCAAAGTTTGAACCAGGACTCC
CCCCTGAGCCAGCCTCGTAGTCCTGCCCAGATCTTGATTTCCTTAGAGAGTGAGGAAAGAGGGGAGCTAGAGAGA
ATCCTAGCAGATCTTGAGGAAGAAAACAGGAATCTGCAAGCAGAATATGACCGTCTAAAGCAGCAGCACGAACAT
AAAGGCCTGTCCCCACTGCCGTCCCCTCCTGAAATGATGCCCACCTCTCCCCAGAGTCCCCGGGATGCTGAGCTC
ATTGCTGAGGCCAAGCTACTGCGTCAACACAAAGGCCGCCTGGAAGCCAGGATGCAAATCCTGGAAGACCACAAT
AAACAGCTGGAGTCACAGTTACACAGGCTAAGGCAGCTGCTGGAGCAACCCCAGGCAGAGGCCAAAGTGAATGGC
ACAACGGTGTCCTCTCCTTCTACCTCTCTACAGAGGTCCGACAGCAGTCAGCCTATGCTGCTCCGAGTGGTTGGC
AGTCAAACTTCGGACTCCATGGGTGAGGAAGATCTTCTCAGTCCTCCCCAGGACACAAGCACAGGGTTAGAGGAG
GTGATGGAGCAACTCAACAACTCCTTCCCTAGTTCAAGAGGAAGAAATACCCCTGGAAAGCCAATGAGAGAGGAC
ACAATG
Utrophin N-terminus through R3_Dystrophin R24 + H4 to end of syntrophin region:
Human sequences without codon alterations:
(SEQ ID NO: 137)
ATGGCCAAGTATGGAGAACATGAAGCCAGTCCTGACAATGGGCAGAACGAATTCAGTGATATCATTAAGTCCAGA
TCTGATGAACACAATGACGTACAGAAGAAAACCTTTACCAAATGGATAAATGCTCGATTTTCAAAGAGTGGGAAA
CCACCCATCAATGATATGTTCACAGACCTCAAAGATGGAAGGAAGCTATTGGATCTTCTAGAAGGCCTCACAGGA
ACATCACTGCCAAAGGAACGTGGTTCCACAAGGGTACATGCCTTAAATAACGTCAACAGAGTGCTGCAGGTTTTA
CATCAGAACAATGTGGAATTAGTGAATATAGGGGGAACTGACATTGTGGATGGAAATCACAAACTGACTTTGGGG
TTACTTTGGAGCATCATTTTGCACTGGCAGGTGAAAGATGTCATGAAGGATGTCATGTCGGACCTGCAGCAGACG
AACAGTGAGAAGATCCTGCTCAGCTGGGTGCGTCAGACCACCAGGCCCTACAGCCAAGTCAACGTCCTCAACTTC
ACCACCAGCTGGACAGATGGACTCGCCTTTAATGCTGTCCTCCACCGACATAAACCTGATCTCTTCAGCTGGGAT
AAAGTTGTCAAAATGTCACCAATTGAGAGACTTGAACATGCCTTCAGCAAGGCTCAAACTTATTTGGGAATTGAA
AAGCTGTTAGATCCTGAAGATGTTGCCGTTCAGCTTCCTGACAAGAAATCCATAATTATGTATTTAACATCTTTG
TTTGAGGTGCTACCTCAGCAAGTCACCATAGACGCCATCCGTGAGGTAGAGACACTCCCAAGGAAATATAAAAAA
GAATGTGAAGAAGAGGCAATTAATATACAGAGTACAGCGCCTGAGGAGGAGCATGAGAGTCCCCGAGCTGAAACT
CCCAGCACTGTCACTGAGGTTGACATGGATCTGGACAGCTATCAGATTGCGTTGGAGGAAGTGCTGACCTGGTTG
CTTTCTGCTGAGGACACTTTCCAGGAGCAGGATGATATTTCTGATGATGTTGAAGAAGTCAAAGACCAGTTTGCA
ACCCATGAAGCTTTTATGATGGAACTGACTGCACACCAGAGCAGTGTGGGCAGCGTCCTGCAGGCAGGCAACCAA
CTGATAACACAAGGAACTCTGTCAGACGAAGAAGAATTTGAGATTCAGGAACAGATGACCCTGCTGAATGCTAGA
TGGGAGGCTCTTAGGGTGGAGAGTATGGACAGACAGTCCCGGCTGCACGATGTGCTGATGGAACTGCAGAAGAAG
CAACTGCAGCAGCTCTCCGCCTGGTTAACACTCACAGAGGAGCGCATTCAGAAGATGGAAACTTGCCCCCTGGAT
GATGATGTAAAATCTCTACAAAAGCTGCTAGAAGAACATAAAAGTTTGCAAAGTGATCTTGAGGCTGAACAGGTG
AAAGTAAATTCACTAACTCACATGGTGGTCATTGTTGATGAAAACAGTGGTGAGAGTGCTACAGCTATCCTAGAA
GACCAGTTACAGAAACTTGGTGAGCGCTGGACAGCAGTATGCCGTTGGACTGAAGAACGCTGGAATAGGTTACAA
GAAATCAATATATTGTGGCAGGAATTATTGGAAGAACAGTGCTTGTTGAAAGCTTGGTTAACCGAAAAAGAAGAG
GCTTTAAATAAAGTCCAGACAAGCAACTTCAAAGACCAAAAGGAACTAAGTGTCAGTGTTCGACGTCTGGCTATT
TTGAAGGAAGACATGGAAATGAAGCGTCAAACATTGGATCAGCTGAGTGAGATTGGCCAGGATGTGGGACAATTA
CTTGATAATTCCAAGGCATCTAAGAAGATCAACAGTGACTCAGAGGAACTGACTCAAAGATGGGATTCTTTGGTT
CAGAGACTAGAAGATTCCTCCAACCAGGTGACTCAGGCTGCCGCTAGCGCCCAGAGAAAAATAGATGAGACCCTT
GAAAGACTCCGGGAACTTCAAGAGGCCACGGATGAGCTGGACCTCAAGCTGCGCCAAGCTGAGGTGATCAAGGGA
TCCTGGCAGCCCGTGGGCGATCTCCTCATTGACTCTCTCCAAGATCACCTCGAGAAAGTCAAGGCACTTCGAGGA
GAAATTGCGCCTCTGAAAGAGAACGTGAGCCACGTCAATGACCTTGCTCGCCAGCTTACCACTTTGGGCATTCAG
CTCTCACCGTATAACCTCAGCACTCTGGAAGACCTGAACACCAGATGGAAGCTTCTGCAGGTGGCCGTCGAGGAC
CGAGTCAGGCAGCTGCATGAAGCCCACAGGGACTTTGGTCCAGCATCTCAGCACTTTCTTTCCACGTCTGTCCAG
GGTCCCTGGGAGAGAGCCATCTCGCCAAACAAAGTGCCCTACTATATCAACCACGAGACTCAAACAACTTGCTGG
GACCATCCCAAAATGACAGAGCTCTACCAGTCTTTAGCTGACCTGAATAATGTCAGATTCTCAGCTTATAGGACT
GCCATGAAACTCCGAAGACTGCAGAAGGCCCTTTGCTTGGATCTCTTGAGCCTGTCAGCTGCATGTGATGCCTTG
GACCAGCACAACCTCAAGCAAAATGACCAGCCCATGGATATCCTGCAGATTATTAATTGTTTGACCACTATTTAT
GACCGCCTGGAGCAAGAGCACAACAATTTGGTCAACGTCCCTCTCTGCGTGGATATGTGTCTGAACTGGCTGCTG
AATGTTTATGATACGGGACGAACAGGGAGGATCCGTGTCCTGTCTTTTAAAACTGGCATCATTTCCCTGTGTAAA
GCACATTTGGAAGACAAGTACAGATACCTTTTCAAGCAAGTGGCAAGTTCAACAGGATTTTGTGACCAGCGCAGG
CTGGGCCTCCTTCTGCATGATTCTATCCAAATTCCAAGACAGTTGGGTGAAGTTGCATCCTTTGGGGGCAGTAAC
ATTGAGCCAAGTGTCCGGAGCTGCTTCCAATTTGCTAATAATAAGCCAGAGATCGAAGCGGCCCTCTTCCTAGAC
TGGATGAGACTGGAACCCCAGTCCATGGTGTGGCTGCCCGTCCTGCACAGAGTGGCTGCTGCAGAAACTGCCAAG
CATCAGGCCAAATGTAACATCTGCAAAGAGTGTCCAATCATTGGATTCAGGTACAGGAGTCTAAAGCACTTTAAT
TATGACATCTGCCAAAGCTGCTTTTTTTCTGGTCGAGTTGCAAAAGGCCATAAAATGCACTATCCCATGGTGGAA
TATTGCACTCCGACTACATCAGGAGAAGATGTTCGAGACTTTGCCAAGGTACTAAAAAACAAATTTCGAACCAAA
AGGTATTTTGCGAAGCATCCCCGAATGGGCTACCTGCCAGTGCAGACTGTCTTAGAGGGGGACAACATGGAAACT
CCCGTTACTCTGATCAACTTCTGGCCAGTAGATTCTGCGCCTGCCTCGTCCCCTCAGCTTTCACACGATGATACT
CATTCACGCATTGAACATTATGCTAGCAGGCTAGCAGAAATGGAAAACAGCAATGGATCTTATCTAAATGATAGC
ATCTCTCCTAATGAGAGCATAGATGATGAACATTTGTTAATCCAGCATTACTGCCAAAGTTTGAACCAGGACTCC
CCCCTGAGCCAGCCTCGTAGT
Human sequences with codon optimization:
(SEQ ID NO: 138)
ATGGCCAAGTACGGCGAGCACGAGGCCAGCCCCGACAACGGCCAGAACGAGTTCAGCGACATCATCAAGAGCCGG
AGCGACGAGCACAACGACGTGCAGAAGAAGACCTTCACCAAGTGGATCAACGCCCGGTTCAGCAAGAGCGGCAAG
CCCCCCATCAACGACATGTTCACCGACCTGAAGGACGGCCGGAAGCTGCTGGACCTGCTGGAGGGCCTGACCGGC
ACCAGCCTGCCCAAGGAGCGGGGCAGCACCCGGGTGCACGCCCTGAACAACGTGAACCGGGTGCTGCAGGTGCTG
CACCAGAACAACGTGGAGCTGGTGAACATCGGCGGCACCGACATCGTGGACGGCAACCACAAGCTGACCCTGGGC
CTGCTGTGGAGCATCATCCTGCACTGGCAGGTGAAGGACGTGATGAAGGACGTGATGAGCGACCTGCAGCAGACC
AACAGCGAGAAGATCCTGCTGAGCTGGGTGCGGCAGACCACCCGGCCCTACAGCCAGGTGAACGTGCTGAACTTC
ACCACCAGCTGGACCGACGGCCTGGCCTTCAACGCCGTGCTGCACCGGCACAAGCCCGACCTGTTCAGCTGGGAC
AAGGTGGTGAAGATGAGCCCCATCGAGCGGCTGGAGCACGCCTTCAGCAAGGCCCAGACCTACCTGGGCATCGAG
AAGCTGCTGGACCCCGAGGACGTGGCCGTGCAGCTGCCCGACAAGAAGAGCATCATCATGTACCTGACCAGCCTG
TTCGAGGTGCTGCCCCAGCAGGTGACCATCGACGCCATCCGGGAGGTGGAGACCCTGCCCCGGAAGTACAAGAAG
GAGTGCGAGGAGGAGGCCATCAACATCCAGAGCACCGCCCCCGAGGAGGAGCACGAGAGCCCCCGGGCCGAGACC
CCCAGCACCGTGACCGAGGTGGACATGGACCTGGACAGCTACCAGATCGCCCTGGAGGAGGTGCTGACCTGGCTG
CTGAGCGCCGAGGACACCTTCCAGGAGCAGGACGACATCAGCGACGACGTGGAGGAGGTGAAGGACCAGTTCGCC
ACCCACGAGGCCTTCATGATGGAGCTGACCGCCCACCAGAGCAGCGTGGGCAGCGTGCTGCAGGCCGGCAACCAG
CTGATCACCCAGGGCACCCTGAGCGACGAGGAGGAGTTCGAGATCCAGGAGCAGATGACCCTGCTGAACGCCCGG
TGGGAGGCCCTGCGGGTGGAGAGCATGGACCGGCAGAGCCGGCTGCACGACGTGCTGATGGAGCTGCAGAAGAAG
CAGCTGCAGCAGCTGAGCGCCTGGCTGACCCTGACCGAGGAGCGGATCCAGAAGATGGAGACCTGCCCCCTGGAC
GACGACGTGAAGAGCCTGCAGAAGCTGCTGGAGGAGCACAAGAGCCTGCAGAGCGACCTGGAGGCCGAGCAGGTG
AAGGTGAACAGCCTGACCCACATGGTGGTGATCGTGGACGAGAACAGCGGCGAGAGCGCCACCGCCATCCTGGAG
GACCAGCTGCAGAAGCTGGGCGAGCGGTGGACCGCCGTGTGCCGGTGGACCGAGGAGCGGTGGAACCGGCTGCAG
GAGATCAACATCCTGTGGCAGGAGCTGCTGGAGGAGCAGTGCCTGCTGAAGGCCTGGCTGACCGAGAAGGAGGAG
GCCCTGAACAAGGTGCAGACCAGCAACTTCAAGGACCAGAAGGAGCTGAGCGTGAGCGTGCGGCGGCTGGCCATC
CTGAAGGAGGACATGGAGATGAAGCGGCAGACCCTGGACCAGCTGAGCGAGATCGGCCAGGACGTGGGCCAGCTG
CTGGACAACAGCAAGGCCAGCAAGAAGATCAACAGCGACAGCGAGGAGCTGACCCAGCGGTGGGACAGCCTGGTG
CAGCGGCTGGAGGACAGCAGCAACCAGGTGACCCAGGCCGCCGCTAGCGCCCAGAGAAAAATAGATGAGACCCTT
GAAAGACTCCGGGAACTTCAAGAGGCCACGGATGAGCTGGACCTCAAGCTGCGCCAAGCTGAGGTGATCAAGGGA
TCCTGGCAGCCCGTGGGCGATCTCCTCATTGACTCTCTCCAAGATCACCTCGAGAAAGTCAAGGCACTTCGAGGA
GAAATTGCGCCTCTGAAAGAGAACGTGAGCCACGTCAATGACCTTGCTCGCCAGCTTACCACTTTGGGCATTCAG
CTCTCACCGTATAACCTCAGCACTCTGGAAGACCTGAACACCAGATGGAAGCTTCTGCAGGTGGCCGTCGAGGAC
CGAGTCAGGCAGCTGCATGAAGCCCACAGGGACTTTGGTCCAGCATCTCAGCACTTTCTTTCCACGTCTGTCCAG
GGTCCCTGGGAGAGAGCCATCTCGCCAAACAAAGTGCCCTACTATATCAACCACGAGACTCAAACAACTTGCTGG
GACCATCCCAAAATGACAGAGCTCTACCAGTCTTTAGCTGACCTGAATAATGTCAGATTCTCAGCTTATAGGACT
GCCATGAAACTCCGAAGACTGCAGAAGGCCCTTTGCTTGGATCTCTTGAGCCTGTCAGCTGCATGTGATGCCTTG
GACCAGCACAACCTCAAGCAAAATGACCAGCCCATGGATATCCTGCAGATTATTAATTGTTTGACCACTATTTAT
GACCGCCTGGAGCAAGAGCACAACAATTTGGTCAACGTCCCTCTCTGCGTGGATATGTGTCTGAACTGGCTGCTG
AATGTTTATGATACGGGACGAACAGGGAGGATCCGTGTCCTGTCTTTTAAAACTGGCATCATTTCCCTGTGTAAA
GCACATTTGGAAGACAAGTACAGATACCTTTTCAAGCAAGTGGCAAGTTCAACAGGATTTTGTGACCAGCGCAGG
CTGGGCCTCCTTCTGCATGATTCTATCCAAATTCCAAGACAGTTGGGTGAAGTTGCATCCTTTGGGGGCAGTAAC
ATTGAGCCAAGTGTCCGGAGCTGCTTCCAATTTGCTAATAATAAGCCAGAGATCGAAGCGGCCCTCTTCCTAGAC
TGGATGAGACTGGAACCCCAGTCCATGGTGTGGCTGCCCGTCCTGCACAGAGTGGCTGCTGCAGAAACTGCCAAG
CATCAGGCCAAATGTAACATCTGCAAAGAGTGTCCAATCATTGGATTCAGGTACAGGAGTCTAAAGCACTTTAAT
TATGACATCTGCCAAAGCTGCTTTTTTTCTGGTCGAGTTGCAAAAGGCCATAAAATGCACTATCCCATGGTGGAA
TATTGCACTCCGACTACATCAGGAGAAGATGTTCGAGACTTTGCCAAGGTACTAAAAAACAAATTTCGAACCAAA
AGGTATTTTGCGAAGCATCCCCGAATGGGCTACCTGCCAGTGCAGACTGTCTTAGAGGGGGACAACATGGAAACT
CCCGTTACTCTGATCAACTTCTGGCCAGTAGATTCTGCGCCTGCCTCGTCCCCTCAGCTTTCACACGATGATACT
CATTCACGCATTGAACATTATGCTAGCAGGCTAGCAGAAATGGAAAACAGCAATGGATCTTATCTAAATGATAGC
ATCTCTCCTAATGAGAGCATAGATGATGAACATTTGTTAATCCAGCATTACTGCCAAAGTTTGAACCAGGACTCC
CCCCTGAGCCAGCCTCGTAGT
Utrophin N-terminus through R3_Dystrophin R24 + H4 to 1st coiled coil and proline
rich region that follows:
Human sequences without codon alterations:
(SEQ ID NO: 139)
ATGGCCAAGTATGGAGAACATGAAGCCAGTCCTGACAATGGGCAGAACGAATTCAGTGATATCATTAAGTCCAGA
TCTGATGAACACAATGACGTACAGAAGAAAACCTTTACCAAATGGATAAATGCTCGATTTTCAAAGAGTGGGAAA
CCACCCATCAATGATATGTTCACAGACCTCAAAGATGGAAGGAAGCTATTGGATCTTCTAGAAGGCCTCACAGGA
ACATCACTGCCAAAGGAACGTGGTTCCACAAGGGTACATGCCTTAAATAACGTCAACAGAGTGCTGCAGGTTTTA
CATCAGAACAATGTGGAATTAGTGAATATAGGGGGAACTGACATTGTGGATGGAAATCACAAACTGACTTTGGGG
TTACTTTGGAGCATCATTTTGCACTGGCAGGTGAAAGATGTCATGAAGGATGTCATGTCGGACCTGCAGCAGACG
AACAGTGAGAAGATCCTGCTCAGCTGGGTGCGTCAGACCACCAGGCCCTACAGCCAAGTCAACGTCCTCAACTTC
ACCACCAGCTGGACAGATGGACTCGCCTTTAATGCTGTCCTCCACCGACATAAACCTGATCTCTTCAGCTGGGAT
AAAGTTGTCAAAATGTCACCAATTGAGAGACTTGAACATGCCTTCAGCAAGGCTCAAACTTATTTGGGAATTGAA
AAGCTGTTAGATCCTGAAGATGTTGCCGTTCAGCTTCCTGACAAGAAATCCATAATTATGTATTTAACATCTTTG
TTTGAGGTGCTACCTCAGCAAGTCACCATAGACGCCATCCGTGAGGTAGAGACACTCCCAAGGAAATATAAAAAA
GAATGTGAAGAAGAGGCAATTAATATACAGAGTACAGCGCCTGAGGAGGAGCATGAGAGTCCCCGAGCTGAAACT
CCCAGCACTGTCACTGAGGTTGACATGGATCTGGACAGCTATCAGATTGCGTTGGAGGAAGTGCTGACCTGGTTG
CTTTCTGCTGAGGACACTTTCCAGGAGCAGGATGATATTTCTGATGATGTTGAAGAAGTCAAAGACCAGTTTGCA
ACCCATGAAGCTTTTATGATGGAACTGACTGCACACCAGAGCAGTGTGGGCAGCGTCCTGCAGGCAGGCAACCAA
CTGATAACACAAGGAACTCTGTCAGACGAAGAAGAATTTGAGATTCAGGAACAGATGACCCTGCTGAATGCTAGA
TGGGAGGCTCTTAGGGTGGAGAGTATGGACAGACAGTCCCGGCTGCACGATGTGCTGATGGAACTGCAGAAGAAG
CAACTGCAGCAGCTCTCCGCCTGGTTAACACTCACAGAGGAGCGCATTCAGAAGATGGAAACTTGCCCCCTGGAT
GATGATGTAAAATCTCTACAAAAGCTGCTAGAAGAACATAAAAGTTTGCAAAGTGATCTTGAGGCTGAACAGGTG
AAAGTAAATTCACTAACTCACATGGTGGTCATTGTTGATGAAAACAGTGGTGAGAGTGCTACAGCTATCCTAGAA
GACCAGTTACAGAAACTTGGTGAGCGCTGGACAGCAGTATGCCGTTGGACTGAAGAACGCTGGAATAGGTTACAA
GAAATCAATATATTGTGGCAGGAATTATTGGAAGAACAGTGCTTGTTGAAAGCTTGGTTAACCGAAAAAGAAGAG
GCTTTAAATAAAGTCCAGACAAGCAACTTCAAAGACCAAAAGGAACTAAGTGTCAGTGTTCGACGTCTGGCTATT
TTGAAGGAAGACATGGAAATGAAGCGTCAAACATTGGATCAGCTGAGTGAGATTGGCCAGGATGTGGGACAATTA
CTTGATAATTCCAAGGCATCTAAGAAGATCAACAGTGACTCAGAGGAACTGACTCAAAGATGGGATTCTTTGGTT
CAGAGACTAGAAGATTCCTCCAACCAGGTGACTCAGGCtGCCGCTAGCGCCCAGAGAAAAATAGATGAGACCCTT
GAAAGACTCCGGGAACTTCAAGAGGCCACGGATGAGCTGGACCTCAAGCTGCGCCAAGCTGAGGTGATCAAGGGA
TCCTGGCAGCCCGTGGGCGATCTCCTCATTGACTCTCTCCAAGATCACCTCGAGAAAGTCAAGGCACTTCGAGGA
GAAATTGCGCCTCTGAAAGAGAACGTGAGCCACGTCAATGACCTTGCTCGCCAGCTTACCACTTTGGGCATTCAG
CTCTCACCGTATAACCTCAGCACTCTGGAAGACCTGAACACCAGATGGAAGCTTCTGCAGGTGGCCGTCGAGGAC
CGAGTCAGGCAGCTGCATGAAGCCCACAGGGACTTTGGTCCAGCATCTCAGCACTTTCTTTCCACGTCTGTCCAG
GGTCCCTGGGAGAGAGCCATCTCGCCAAACAAAGTGCCCTACTATATCAACCACGAGACTCAAACAACTTGCTGG
GACCATCCCAAAATGACAGAGCTCTACCAGTCTTTAGCTGACCTGAATAATGTCAGATTCTCAGCTTATAGGACT
GCCATGAAACTCCGAAGACTGCAGAAGGCCCTTTGCTTGGATCTCTTGAGCCTGTCAGCTGCATGTGATGCCTTG
GACCAGCACAACCTCAAGCAAAATGACCAGCCCATGGATATCCTGCAGATTATTAATTGTTTGACCACTATTTAT
GACCGCCTGGAGCAAGAGCACAACAATTTGGTCAACGTCCCTCTCTGCGTGGATATGTGTCTGAACTGGCTGCTG
AATGTTTATGATACGGGACGAACAGGGAGGATCCGTGTCCTGTCTTTTAAAACTGGCATCATTTCCCTGTGTAAA
GCACATTTGGAAGACAAGTACAGATACCTTTTCAAGCAAGTGGCAAGTTCAACAGGATTTTGTGACCAGCGCAGG
CTGGGCCTCCTTCTGCATGATTCTATCCAAATTCCAAGACAGTTGGGTGAAGTTGCATCCTTTGGGGGCAGTAAC
ATTGAGCCAAGTGTCCGGAGCTGCTTCCAATTTGCTAATAATAAGCCAGAGATCGAAGCGGCCCTCTTCCTAGAC
TGGATGAGACTGGAACCCCAGTCCATGGTGTGGCTGCCCGTCCTGCACAGAGTGGCTGCTGCAGAAACTGCCAAG
CATCAGGCCAAATGTAACATCTGCAAAGAGTGTCCAATCATTGGATTCAGGTACAGGAGTCTAAAGCACTTTAAT
TATGACATCTGCCAAAGCTGCTTTTTTTCTGGTCGAGTTGCAAAAGGCCATAAAATGCACTATCCCATGGTGGAA
TATTGCACTCCGACTACATCAGGAGAAGATGTTCGAGACTTTGCCAAGGTACTAAAAAACAAATTTCGAACCAAA
AGGTATTTTGCGAAGCATCCCCGAATGGGCTACCTGCCAGTGCAGACTGTCTTAGAGGGGGACAACATGGAAACT
CCCGTTACTCTGATCAACTTCTGGCCAGTAGATTCTGCGCCTGCCTCGTCCCCTCAGCTTTCACACGATGATACT
CATTCACGCATTGAACATTATGCTAGCAGGCTAGCAGAAATGGAAAACAGCAATGGATCTTATCTAAATGATAGC
ATCTCTCCTAATGAGAGCATAGATGATGAACATTTGTTAATCCAGCATTACTGCCAAAGTTTGAACCAGGACTCC
CCCCTGAGCCAGCCTCGTAGTCCTGCCCAGATCTTGATTTCCTTAGAGAGTGAGGAAAGAGGGGAGCTAGAGAGA
ATCCTAGCAGATCTTGAGGAAGAAAACAGGAATCTGCAAGCAGAATATGACCGTCTAAAGCAGCAGCACGAACAT
AAAGGCCTGTCCCCACTGCCGTCCCCTCCTGAAATGATGCCCACCTCTCCCCAGAGTCCC
Human sequences with codon optimization:
(SEQ ID NO: 140)
ATGGCCAAGTACGGCGAGCACGAGGCCAGCCCCGACAACGGCCAGAACGAGTTCAGCGACATCATCAAGAGCCGG
AGCGACGAGCACAACGACGTGCAGAAGAAGACCTTCACCAAGTGGATCAACGCCCGGTTCAGCAAGAGCGGCAAG
CCCCCCATCAACGACATGTTCACCGACCTGAAGGACGGCCGGAAGCTGCTGGACCTGCTGGAGGGCCTGACCGGC
ACCAGCCTGCCCAAGGAGCGGGGCAGCACCCGGGTGCACGCCCTGAACAACGTGAACCGGGTGCTGCAGGTGCTG
CACCAGAACAACGTGGAGCTGGTGAACATCGGCGGCACCGACATCGTGGACGGCAACCACAAGCTGACCCTGGGC
CTGCTGTGGAGCATCATCCTGCACTGGCAGGTGAAGGACGTGATGAAGGACGTGATGAGCGACCTGCAGCAGACC
AACAGCGAGAAGATCCTGCTGAGCTGGGTGCGGCAGACCACCCGGCCCTACAGCCAGGTGAACGTGCTGAACTTC
ACCACCAGCTGGACCGACGGCCTGGCCTTCAACGCCGTGCTGCACCGGCACAAGCCCGACCTGTTCAGCTGGGAC
AAGGTGGTGAAGATGAGCCCCATCGAGCGGCTGGAGCACGCCTTCAGCAAGGCCCAGACCTACCTGGGCATCGAG
AAGCTGCTGGACCCCGAGGACGTGGCCGTGCAGCTGCCCGACAAGAAGAGCATCATCATGTACCTGACCAGCCTG
TTCGAGGTGCTGCCCCAGCAGGTGACCATCGACGCCATCCGGGAGGTGGAGACCCTGCCCCGGAAGTACAAGAAG
GAGTGCGAGGAGGAGGCCATCAACATCCAGAGCACCGCCCCCGAGGAGGAGCACGAGAGCCCCCGGGCCGAGACC
CCCAGCACCGTGACCGAGGTGGACATGGACCTGGACAGCTACCAGATCGCCCTGGAGGAGGTGCTGACCTGGCTG
CTGAGCGCCGAGGACACCTTCCAGGAGCAGGACGACATCAGCGACGACGTGGAGGAGGTGAAGGACCAGTTCGCC
ACCCACGAGGCCTTCATGATGGAGCTGACCGCCCACCAGAGCAGCGTGGGCAGCGTGCTGCAGGCCGGCAACCAG
CTGATCACCCAGGGCACCCTGAGCGACGAGGAGGAGTTCGAGATCCAGGAGCAGATGACCCTGCTGAACGCCCGG
TGGGAGGCCCTGCGGGTGGAGAGCATGGACCGGCAGAGCCGGCTGCACGACGTGCTGATGGAGCTGCAGAAGAAG
CAGCTGCAGCAGCTGAGCGCCTGGCTGACCCTGACCGAGGAGCGGATCCAGAAGATGGAGACCTGCCCCCTGGAC
GACGACGTGAAGAGCCTGCAGAAGCTGCTGGAGGAGCACAAGAGCCTGCAGAGCGACCTGGAGGCCGAGCAGGTG
AAGGTGAACAGCCTGACCCACATGGTGGTGATCGTGGACGAGAACAGCGGCGAGAGCGCCACCGCCATCCTGGAG
GACCAGCTGCAGAAGCTGGGCGAGCGGTGGACCGCCGTGTGCCGGTGGACCGAGGAGCGGTGGAACCGGCTGCAG
GAGATCAACATCCTGTGGCAGGAGCTGCTGGAGGAGCAGTGCCTGCTGAAGGCCTGGCTGACCGAGAAGGAGGAG
GCCCTGAACAAGGTGCAGACCAGCAACTTCAAGGACCAGAAGGAGCTGAGCGTGAGCGTGCGGCGGCTGGCCATC
CTGAAGGAGGACATGGAGATGAAGCGGCAGACCCTGGACCAGCTGAGCGAGATCGGCCAGGACGTGGGCCAGCTG
CTGGACAACAGCAAGGCCAGCAAGAAGATCAACAGCGACAGCGAGGAGCTGACCCAGCGGTGGGACAGCCTGGTG
CAGCGGCTGGAGGACAGCAGCAACCAGGTGACCCAGGCCGCCGCTAGCGCCCAGAGAAAAATAGATGAGACCCTT
GAAAGACTCCGGGAACTTCAAGAGGCCACGGATGAGCTGGACCTCAAGCTGCGCCAAGCTGAGGTGATCAAGGGA
TCCTGGCAGCCCGTGGGCGATCTCCTCATTGACTCTCTCCAAGATCACCTCGAGAAAGTCAAGGCACTTCGAGGA
GAAATTGCGCCTCTGAAAGAGAACGTGAGCCACGTCAATGACCTTGCTCGCCAGCTTACCACTTTGGGCATTCAG
CTCTCACCGTATAACCTCAGCACTCTGGAAGACCTGAACACCAGATGGAAGCTTCTGCAGGTGGCCGTCGAGGAC
CGAGTCAGGCAGCTGCATGAAGCCCACAGGGACTTTGGTCCAGCATCTCAGCACTTTCTTTCCACGTCTGTCCAG
GGTCCCTGGGAGAGAGCCATCTCGCCAAACAAAGTGCCCTACTATATCAACCACGAGACTCAAACAACTTGCTGG
GACCATCCCAAAATGACAGAGCTCTACCAGTCTTTAGCTGACCTGAATAATGTCAGATTCTCAGCTTATAGGACT
GCCATGAAACTCCGAAGACTGCAGAAGGCCCTTTGCTTGGATCTCTTGAGCCTGTCAGCTGCATGTGATGCCTTG
GACCAGCACAACCTCAAGCAAAATGACCAGCCCATGGATATCCTGCAGATTATTAATTGTTTGACCACTATTTAT
GACCGCCTGGAGCAAGAGCACAACAATTTGGTCAACGTCCCTCTCTGCGTGGATATGTGTCTGAACTGGCTGCTG
AATGTTTATGATACGGGACGAACAGGGAGGATCCGTGTCCTGTCTTTTAAAACTGGCATCATTTCCCTGTGTAAA
GCACATTTGGAAGACAAGTACAGATACCTTTTCAAGCAAGTGGCAAGTTCAACAGGATTTTGTGACCAGCGCAGG
CTGGGCCTCCTTCTGCATGATTCTATCCAAATTCCAAGACAGTTGGGTGAAGTTGCATCCTTTGGGGGCAGTAAC
ATTGAGCCAAGTGTCCGGAGCTGCTTCCAATTTGCTAATAATAAGCCAGAGATCGAAGCGGCCCTCTTCCTAGAC
TGGATGAGACTGGAACCCCAGTCCATGGTGTGGCTGCCCGTCCTGCACAGAGTGGCTGCTGCAGAAACTGCCAAG
CATCAGGCCAAATGTAACATCTGCAAAGAGTGTCCAATCATTGGATTCAGGTACAGGAGTCTAAAGCACTTTAAT
TATGACATCTGCCAAAGCTGCTTTTTTTCTGGTCGAGTTGCAAAAGGCCATAAAATGCACTATCCCATGGTGGAA
TATTGCACTCCGACTACATCAGGAGAAGATGTTCGAGACTTTGCCAAGGTACTAAAAAACAAATTTCGAACCAAA
AGGTATTTTGCGAAGCATCCCCGAATGGGCTACCTGCCAGTGCAGACTGTCTTAGAGGGGGACAACATGGAAACT
CCCGTTACTCTGATCAACTTCTGGCCAGTAGATTCTGCGCCTGCCTCGTCCCCTCAGCTTTCACACGATGATACT
CATTCACGCATTGAACATTATGCTAGCAGGCTAGCAGAAATGGAAAACAGCAATGGATCTTATCTAAATGATAGC
ATCTCTCCTAATGAGAGCATAGATGATGAACATTTGTTAATCCAGCATTACTGCCAAAGTTTGAACCAGGACTCC
CCCCTGAGCCAGCCTCGTAGTCCTGCCCAGATCTTGATTTCCTTAGAGAGTGAGGAAAGAGGGGAGCTAGAGAGA
ATCCTAGCAGATCTTGAGGAAGAAAACAGGAATCTGCAAGCAGAATATGACCGTCTAAAGCAGCAGCACGAACAT
AAAGGCCTGTCCCCACTGCCGTCCCCTCCTGAAATGATGCCCACCTCTCCCCAGAGTCCC
Utrophin N-terminus through H2_Dystrophin R24 + H4 to end of syntrophin region:
Human sequences without codon alterations:
(SEQ ID NO: 141)
ATGGCCAAGTATGGAGAACATGAAGCCAGTCCTGACAATGGGCAGAACGAATTCAGTGATATCATTAAGTCCAGA
TCTGATGAACACAATGACGTACAGAAGAAAACCTTTACCAAATGGATAAATGCTCGATTTTCAAAGAGTGGGAAA
CCACCCATCAATGATATGTTCACAGACCTCAAAGATGGAAGGAAGCTATTGGATCTTCTAGAAGGCCTCACAGGA
ACATCACTGCCAAAGGAACGTGGTTCCACAAGGGTACATGCCTTAAATAACGTCAACAGAGTGCTGCAGGTTTTA
CATCAGAACAATGTGGAATTAGTGAATATAGGGGGAACTGACATTGTGGATGGAAATCACAAACTGACTTTGGGG
TTACTTTGGAGCATCATTTTGCACTGGCAGGTGAAAGATGTCATGAAGGATGTCATGTCGGACCTGCAGCAGACG
AACAGTGAGAAGATCCTGCTCAGCTGGGTGCGTCAGACCACCAGGCCCTACAGCCAAGTCAACGTCCTCAACTTC
ACCACCAGCTGGACAGATGGACTCGCCTTTAATGCTGTCCTCCACCGACATAAACCTGATCTCTTCAGCTGGGAT
AAAGTTGTCAAAATGTCACCAATTGAGAGACTTGAACATGCCTTCAGCAAGGCTCAAACTTATTTGGGAATTGAA
AAGCTGTTAGATCCTGAAGATGTTGCCGTTCAGCTTCCTGACAAGAAATCCATAATTATGTATTTAACATCTTTG
TTTGAGGTGCTACCTCAGCAAGTCACCATAGACGCCATCCGTGAGGTAGAGACACTCCCAAGGAAATATAAAAAA
GAATGTGAAGAAGAGGCAATTAATATACAGAGTACAGCGCCTGAGGAGGAGCATGAGAGTCCCCGAGCTGAAACT
CCCAGCACTGTCACTGAGGTTGACATGGATCTGGACAGCTATCAGATTGCGTTGGAGGAAGTGCTGACCTGGTTG
CTTTCTGCTGAGGACACTTTCCAGGAGCAGGATGATATTTCTGATGATGTTGAAGAAGTCAAAGACCAGTTTGCA
ACCCATGAAGCTTTTATGATGGAACTGACTGCACACCAGAGCAGTGTGGGCAGCGTCCTGCAGGCAGGCAACCAA
CTGATAACACAAGGAACTCTGTCAGACGAAGAAGAATTTGAGATTCAGGAACAGATGACCCTGCTGAATGCTAGA
TGGGAGGCTCTTAGGGTGGAGAGTATGGACAGACAGTCCCGGCTGCACGATGTGCTGATGGAACTGCAGAAGAAG
CAACTGCAGCAGCTCTCCGCCTGGTTAACACTCACAGAGGAGCGCATTCAGAAGATGGAAACTTGCCCCCTGGAT
GATGATGTAAAATCTCTACAAAAGCTGCTAGAAGAACATAAAAGTTTGCAAAGTGATCTTGAGGCTGAACAGGTG
AAAGTAAATTCACTAACTCACATGGTGGTCATTGTTGATGAAAACAGTGGTGAGAGTGCTACAGCTATCCTAGAA
GACCAGTTACAGAAACTTGGTGAGCGCTGGACAGCAGTATGCCGTTGGACTGAAGAACGCTGGAATAGGTTACAA
GAAATCAATATATTGTGGCAGGAATTATTGGAAGAACAGTGCTTGTTGAAAGCTTGGTTAACCGAAAAAGAAGAG
GCTTTAAATAAAGTCCAGACAAGCAACTTCAAAGACCAAAAGGAACTAAGTGTCAGTGTTCGACGTCTGGCTATT
TTGAAGGAAGACATGGAAATGAAGCGTCAAACATTGGATCAGCTGAGTGAGATTGGCCAGGATGTGGGACAATTA
CTTGATAATTCCAAGGCATCTAAGAAGATCAACAGTGACTCAGAGGAACTGACTCAAAGATGGGATTCTTTGGTT
CAGAGACTAGAAGATTCCTCCAACCAGGTGACTCAGGCTGTAGCAAAGCTGGGGATGTCTCAGATTCCTCAGAAG
GACCTTTTGGAGACTGTTCGTGTAAGAGAACAAGCAATTACAAAAAAATCTAAGCAGGAAGCCGCTAGCGCCCAG
AGAAAAATAGATGAGACCCTTGAAAGACTCCGGGAACTTCAAGAGGCCACGGATGAGCTGGACCTCAAGCTGCGC
CAAGCTGAGGTGATCAAGGGATCCTGGCAGCCCGTGGGCGATCTCCTCATTGACTCTCTCCAAGATCACCTCGAG
AAAGTCAAGGCACTTCGAGGAGAAATTGCGCCTCTGAAAGAGAACGTGAGCCACGTCAATGACCTTGCTCGCCAG
CTTACCACTTTGGGCATTCAGCTCTCACCGTATAACCTCAGCACTCTGGAAGACCTGAACACCAGATGGAAGCTT
CTGCAGGTGGCCGTCGAGGACCGAGTCAGGCAGCTGCATGAAGCCCACAGGGACTTTGGTCCAGCATCTCAGCAC
TTTCTTTCCACGTCTGTCCAGGGTCCCTGGGAGAGAGCCATCTCGCCAAACAAAGTGCCCTACTATATCAACCAC
GAGACTCAAACAACTTGCTGGGACCATCCCAAAATGACAGAGCTCTACCAGTCTTTAGCTGACCTGAATAATGTC
AGATTCTCAGCTTATAGGACTGCCATGAAACTCCGAAGACTGCAGAAGGCCCTTTGCTTGGATCTCTTGAGCCTG
TCAGCTGCATGTGATGCCTTGGACCAGCACAACCTCAAGCAAAATGACCAGCCCATGGATATCCTGCAGATTATT
AATTGTTTGACCACTATTTATGACCGCCTGGAGCAAGAGCACAACAATTTGGTCAACGTCCCTCTCTGCGTGGAT
ATGTGTCTGAACTGGCTGCTGAATGTTTATGATACGGGACGAACAGGGAGGATCCGTGTCCTGTCTTTTAAAACT
GGCATCATTTCCCTGTGTAAAGCACATTTGGAAGACAAGTACAGATACCTTTTCAAGCAAGTGGCAAGTTCAACA
GGATTTTGTGACCAGCGCAGGCTGGGCCTCCTTCTGCATGATTCTATCCAAATTCCAAGACAGTTGGGTGAAGTT
GCATCCTTTGGGGGCAGTAACATTGAGCCAAGTGTCCGGAGCTGCTTCCAATTTGCTAATAATAAGCCAGAGATC
GAAGCGGCCCTCTTCCTAGACTGGATGAGACTGGAACCCCAGTCCATGGTGTGGCTGCCCGTCCTGCACAGAGTG
GCTGCTGCAGAAACTGCCAAGCATCAGGCCAAATGTAACATCTGCAAAGAGTGTCCAATCATTGGATTCAGGTAC
AGGAGTCTAAAGCACTTTAATTATGACATCTGCCAAAGCTGCTTTTTTTCTGGTCGAGTTGCAAAAGGCCATAAA
ATGCACTATCCCATGGTGGAATATTGCACTCCGACTACATCAGGAGAAGATGTTCGAGACTTTGCCAAGGTACTA
AAAAACAAATTTCGAACCAAAAGGTATTTTGCGAAGCATCCCCGAATGGGCTACCTGCCAGTGCAGACTGTCTTA
GAGGGGGACAACATGGAAACTCCCGTTACTCTGATCAACTTCTGGCCAGTAGATTCTGCGCCTGCCTCGTCCCCT
CAGCTTTCACACGATGATACTCATTCACGCATTGAACATTATGCTAGCAGGCTAGCAGAAATGGAAAACAGCAAT
GGATCTTATCTAAATGATAGCATCTCTCCTAATGAGAGCATAGATGATGAACATTTGTTAATCCAGCATTACTGC
CAAAGTTTGAACCAGGACTCCCCCCTGAGCCAGCCTCGTAGT
Human sequences with codon optimization:
(SEQ ID NO: 142)
ATGGCCAAGTACGGCGAGCACGAGGCCAGCCCCGACAACGGCCAGAACGAGTTCAGCGACATCATCAAGAGCCGG
AGCGACGAGCACAACGACGTGCAGAAGAAGACCTTCACCAAGTGGATCAACGCCCGGTTCAGCAAGAGCGGCAAG
CCCCCCATCAACGACATGTTCACCGACCTGAAGGACGGCCGGAAGCTGCTGGACCTGCTGGAGGGCCTGACCGGC
ACCAGCCTGCCCAAGGAGCGGGGCAGCACCCGGGTGCACGCCCTGAACAACGTGAACCGGGTGCTGCAGGTGCTG
CACCAGAACAACGTGGAGCTGGTGAACATCGGCGGCACCGACATCGTGGACGGCAACCACAAGCTGACCCTGGGC
CTGCTGTGGAGCATCATCCTGCACTGGCAGGTGAAGGACGTGATGAAGGACGTGATGAGCGACCTGCAGCAGACC
AACAGCGAGAAGATCCTGCTGAGCTGGGTGCGGCAGACCACCCGGCCCTACAGCCAGGTGAACGTGCTGAACTTC
ACCACCAGCTGGACCGACGGCCTGGCCTTCAACGCCGTGCTGCACCGGCACAAGCCCGACCTGTTCAGCTGGGAC
AAGGTGGTGAAGATGAGCCCCATCGAGCGGCTGGAGCACGCCTTCAGCAAGGCCCAGACCTACCTGGGCATCGAG
AAGCTGCTGGACCCCGAGGACGTGGCCGTGCAGCTGCCCGACAAGAAGAGCATCATCATGTACCTGACCAGCCTG
TTCGAGGTGCTGCCCCAGCAGGTGACCATCGACGCCATCCGGGAGGTGGAGACCCTGCCCCGGAAGTACAAGAAG
GAGTGCGAGGAGGAGGCCATCAACATCCAGAGCACCGCCCCCGAGGAGGAGCACGAGAGCCCCCGGGCCGAGACC
CCCAGCACCGTGACCGAGGTGGACATGGACCTGGACAGCTACCAGATCGCCCTGGAGGAGGTGCTGACCTGGCTG
CTGAGCGCCGAGGACACCTTCCAGGAGCAGGACGACATCAGCGACGACGTGGAGGAGGTGAAGGACCAGTTCGCC
ACCCACGAGGCCTTCATGATGGAGCTGACCGCCCACCAGAGCAGCGTGGGCAGCGTGCTGCAGGCCGGCAACCAG
CTGATCACCCAGGGCACCCTGAGCGACGAGGAGGAGTTCGAGATCCAGGAGCAGATGACCCTGCTGAACGCCCGG
TGGGAGGCCCTGCGGGTGGAGAGCATGGACCGGCAGAGCCGGCTGCACGACGTGCTGATGGAGCTGCAGAAGAAG
CAGCTGCAGCAGCTGAGCGCCTGGCTGACCCTGACCGAGGAGCGGATCCAGAAGATGGAGACCTGCCCCCTGGAC
GACGACGTGAAGAGCCTGCAGAAGCTGCTGGAGGAGCACAAGAGCCTGCAGAGCGACCTGGAGGCCGAGCAGGTG
AAGGTGAACAGCCTGACCCACATGGTGGTGATCGTGGACGAGAACAGCGGCGAGAGCGCCACCGCCATCCTGGAG
GACCAGCTGCAGAAGCTGGGCGAGCGGTGGACCGCCGTGTGCCGGTGGACCGAGGAGCGGTGGAACCGGCTGCAG
GAGATCAACATCCTGTGGCAGGAGCTGCTGGAGGAGCAGTGCCTGCTGAAGGCCTGGCTGACCGAGAAGGAGGAG
GCCCTGAACAAGGTGCAGACCAGCAACTTCAAGGACCAGAAGGAGCTGAGCGTGAGCGTGCGGCGGCTGGCCATC
CTGAAGGAGGACATGGAGATGAAGCGGCAGACCCTGGACCAGCTGAGCGAGATCGGCCAGGACGTGGGCCAGCTG
CTGGACAACAGCAAGGCCAGCAAGAAGATCAACAGCGACAGCGAGGAGCTGACCCAGCGGTGGGACAGCCTGGTG
CAGCGGCTGGAGGACAGCAGCAACCAGGTGACCCAGGCCGTGGCCAAGCTGGGCATGAGCCAGATCCCCCAGAAG
GACCTGCTGGAGACCGTGCGGGTGCGGGAGCAGGCCATCACCAAGAAGAGCAAGCAGGAGGCCGCTAGCGCCCAG
AGAAAAATAGATGAGACCCTTGAAAGACTCCGGGAACTTCAAGAGGCCACGGATGAGCTGGACCTCAAGCTGCGC
CAAGCTGAGGTGATCAAGGGATCCTGGCAGCCCGTGGGCGATCTCCTCATTGACTCTCTCCAAGATCACCTCGAG
AAAGTCAAGGCACTTCGAGGAGAAATTGCGCCTCTGAAAGAGAACGTGAGCCACGTCAATGACCTTGCTCGCCAG
CTTACCACTTTGGGCATTCAGCTCTCACCGTATAACCTCAGCACTCTGGAAGACCTGAACACCAGATGGAAGCTT
CTGCAGGTGGCCGTCGAGGACCGAGTCAGGCAGCTGCATGAAGCCCACAGGGACTTTGGTCCAGCATCTCAGCAC
TTTCTTTCCACGTCTGTCCAGGGTCCCTGGGAGAGAGCCATCTCGCCAAACAAAGTGCCCTACTATATCAACCAC
GAGACTCAAACAACTTGCTGGGACCATCCCAAAATGACAGAGCTCTACCAGTCTTTAGCTGACCTGAATAATGTC
AGATTCTCAGCTTATAGGACTGCCATGAAACTCCGAAGACTGCAGAAGGCCCTTTGCTTGGATCTCTTGAGCCTG
TCAGCTGCATGTGATGCCTTGGACCAGCACAACCTCAAGCAAAATGACCAGCCCATGGATATCCTGCAGATTATT
AATTGTTTGACCACTATTTATGACCGCCTGGAGCAAGAGCACAACAATTTGGTCAACGTCCCTCTCTGCGTGGAT
ATGTGTCTGAACTGGCTGCTGAATGTTTATGATACGGGACGAACAGGGAGGATCCGTGTCCTGTCTTTTAAAACT
GGCATCATTTCCCTGTGTAAAGCACATTTGGAAGACAAGTACAGATACCTTTTCAAGCAAGTGGCAAGTTCAACA
GGATTTTGTGACCAGCGCAGGCTGGGCCTCCTTCTGCATGATTCTATCCAAATTCCAAGACAGTTGGGTGAAGTT
GCATCCTTTGGGGGCAGTAACATTGAGCCAAGTGTCCGGAGCTGCTTCCAATTTGCTAATAATAAGCCAGAGATC
GAAGCGGCCCTCTTCCTAGACTGGATGAGACTGGAACCCCAGTCCATGGTGTGGCTGCCCGTCCTGCACAGAGTG
GCTGCTGCAGAAACTGCCAAGCATCAGGCCAAATGTAACATCTGCAAAGAGTGTCCAATCATTGGATTCAGGTAC
AGGAGTCTAAAGCACTTTAATTATGACATCTGCCAAAGCTGCTTTTTTTCTGGTCGAGTTGCAAAAGGCCATAAA
ATGCACTATCCCATGGTGGAATATTGCACTCCGACTACATCAGGAGAAGATGTTCGAGACTTTGCCAAGGTACTA
AAAAACAAATTTCGAACCAAAAGGTATTTTGCGAAGCATCCCCGAATGGGCTACCTGCCAGTGCAGACTGTCTTA
GAGGGGGACAACATGGAAACTCCCGTTACTCTGATCAACTTCTGGCCAGTAGATTCTGCGCCTGCCTCGTCCCCT
CAGCTTTCACACGATGATACTCATTCACGCATTGAACATTATGCTAGCAGGCTAGCAGAAATGGAAAACAGCAAT
GGATCTTATCTAAATGATAGCATCTCTCCTAATGAGAGCATAGATGATGAACATTTGTTAATCCAGCATTACTGC
CAAAGTTTGAACCAGGACTCCCCCCTGAGCCAGCCTCGTAGT
Utrophin N-terminus through H2_Dystrophin R24 to end:
Human sequences without codon alterations:
(SEQ ID NO: 143)
ATGGCCAAGTATGGAGAACATGAAGCCAGTCCTGACAATGGGCAGAACGAATTCAGTGATATCATTAAGTCCAGA
TCTGATGAACACAATGACGTACAGAAGAAAACCTTTACCAAATGGATAAATGCTCGATTTTCAAAGAGTGGGAAA
CCACCCATCAATGATATGTTCACAGACCTCAAAGATGGAAGGAAGCTATTGGATCTTCTAGAAGGCCTCACAGGA
ACATCACTGCCAAAGGAACGTGGTTCCACAAGGGTACATGCCTTAAATAACGTCAACAGAGTGCTGCAGGTTTTA
CATCAGAACAATGTGGAATTAGTGAATATAGGGGGAACTGACATTGTGGATGGAAATCACAAACTGACTTTGGGG
TTACTTTGGAGCATCATTTTGCACTGGCAGGTGAAAGATGTCATGAAGGATGTCATGTCGGACCTGCAGCAGACG
AACAGTGAGAAGATCCTGCTCAGCTGGGTGCGTCAGACCACCAGGCCCTACAGCCAAGTCAACGTCCTCAACTTC
ACCACCAGCTGGACAGATGGACTCGCCTTTAATGCTGTCCTCCACCGACATAAACCTGATCTCTTCAGCTGGGAT
AAAGTTGTCAAAATGTCACCAATTGAGAGACTTGAACATGCCTTCAGCAAGGCTCAAACTTATTTGGGAATTGAA
AAGCTGTTAGATCCTGAAGATGTTGCCGTTCAGCTTCCTGACAAGAAATCCATAATTATGTATTTAACATCTTTG
TTTGAGGTGCTACCTCAGCAAGTCACCATAGACGCCATCCGTGAGGTAGAGACACTCCCAAGGAAATATAAAAAA
GAATGTGAAGAAGAGGCAATTAATATACAGAGTACAGCGCCTGAGGAGGAGCATGAGAGTCCCCGAGCTGAAACT
CCCAGCACTGTCACTGAGGTTGACATGGATCTGGACAGCTATCAGATTGCGTTGGAGGAAGTGCTGACCTGGTTG
CTTTCTGCTGAGGACACTTTCCAGGAGCAGGATGATATTTCTGATGATGTTGAAGAAGTCAAAGACCAGTTTGCA
ACCCATGAAGCTTTTATGATGGAACTGACTGCACACCAGAGCAGTGTGGGCAGCGTCCTGCAGGCAGGCAACCAA
CTGATAACACAAGGAACTCTGTCAGACGAAGAAGAATTTGAGATTCAGGAACAGATGACCCTGCTGAATGCTAGA
TGGGAGGCTCTTAGGGTGGAGAGTATGGACAGACAGTCCCGGCTGCACGATGTGCTGATGGAACTGCAGAAGAAG
CAACTGCAGCAGCTCTCCGCCTGGTTAACACTCACAGAGGAGCGCATTCAGAAGATGGAAACTTGCCCCCTGGAT
GATGATGTAAAATCTCTACAAAAGCTGCTAGAAGAACATAAAAGTTTGCAAAGTGATCTTGAGGCTGAACAGGTG
AAAGTAAATTCACTAACTCACATGGTGGTCATTGTTGATGAAAACAGTGGTGAGAGTGCTACAGCTATCCTAGAA
GACCAGTTACAGAAACTTGGTGAGCGCTGGACAGCAGTATGCCGTTGGACTGAAGAACGCTGGAATAGGTTACAA
GAAATCAATATATTGTGGCAGGAATTATTGGAAGAACAGTGCTTGTTGAAAGCTTGGTTAACCGAAAAAGAAGAG
GCTTTAAATAAAGTCCAGACAAGCAACTTCAAAGACCAAAAGGAACTAAGTGTCAGTGTTCGACGTCTGGCTATT
TTGAAGGAAGACATGGAAATGAAGCGTCAAACATTGGATCAGCTGAGTGAGATTGGCCAGGATGTGGGACAATTA
CTTGATAATTCCAAGGCATCTAAGAAGATCAACAGTGACTCAGAGGAACTGACTCAAAGATGGGATTCTTTGGTT
CAGAGACTAGAAGATTCCTCCAACCAGGTGACTCAGGCTGTAGCAAAGCTGGGGATGTCTCAGATTCCTCAGAAG
GACCTTTTGGAGACTGTTCGTGTAAGAGAACAAGCAATTACAAAAAAATCTAAGCAGGAAGCCGCTAGCGCCCAG
AGAAAAATAGATGAGACCCTTGAAAGACTCCGGGAACTTCAAGAGGCCACGGATGAGCTGGACCTCAAGCTGCGC
CAAGCTGAGGTGATCAAGGGATCCTGGCAGCCCGTGGGCGATCTCCTCATTGACTCTCTCCAAGATCACCTCGAG
AAAGTCAAGGCACTTCGAGGAGAAATTGCGCCTCTGAAAGAGAACGTGAGCCACGTCAATGACCTTGCTCGCCAG
CTTACCACTTTGGGCATTCAGCTCTCACCGTATAACCTCAGCACTCTGGAAGACCTGAACACCAGATGGAAGCTT
CTGCAGGTGGCCGTCGAGGACCGAGTCAGGCAGCTGCATGAAGCCCACAGGGACTTTGGTCCAGCATCTCAGCAC
TTTCTTTCCACGTCTGTCCAGGGTCCCTGGGAGAGAGCCATCTCGCCAAACAAAGTGCCCTACTATATCAACCAC
GAGACTCAAACAACTTGCTGGGACCATCCCAAAATGACAGAGCTCTACCAGTCTTTAGCTGACCTGAATAATGTC
AGATTCTCAGCTTATAGGACTGCCATGAAACTCCGAAGACTGCAGAAGGCCCTTTGCTTGGATCTCTTGAGCCTG
TCAGCTGCATGTGATGCCTTGGACCAGCACAACCTCAAGCAAAATGACCAGCCCATGGATATCCTGCAGATTATT
AATTGTTTGACCACTATTTATGACCGCCTGGAGCAAGAGCACAACAATTTGGTCAACGTCCCTCTCTGCGTGGAT
ATGTGTCTGAACTGGCTGCTGAATGTTTATGATACGGGACGAACAGGGAGGATCCGTGTCCTGTCTTTTAAAACT
GGCATCATTTCCCTGTGTAAAGCACATTTGGAAGACAAGTACAGATACCTTTTCAAGCAAGTGGCAAGTTCAACA
GGATTTTGTGACCAGCGCAGGCTGGGCCTCCTTCTGCATGATTCTATCCAAATTCCAAGACAGTTGGGTGAAGTT
GCATCCTTTGGGGGCAGTAACATTGAGCCAAGTGTCCGGAGCTGCTTCCAATTTGCTAATAATAAGCCAGAGATC
GAAGCGGCCCTCTTCCTAGACTGGATGAGACTGGAACCCCAGTCCATGGTGTGGCTGCCCGTCCTGCACAGAGTG
GCTGCTGCAGAAACTGCCAAGCATCAGGCCAAATGTAACATCTGCAAAGAGTGTCCAATCATTGGATTCAGGTAC
AGGAGTCTAAAGCACTTTAATTATGACATCTGCCAAAGCTGCTTTTTTTCTGGTCGAGTTGCAAAAGGCCATAAA
ATGCACTATCCCATGGTGGAATATTGCACTCCGACTACATCAGGAGAAGATGTTCGAGACTTTGCCAAGGTACTA
AAAAACAAATTTCGAACCAAAAGGTATTTTGCGAAGCATCCCCGAATGGGCTACCTGCCAGTGCAGACTGTCTTA
GAGGGGGACAACATGGAAACTCCCGTTACTCTGATCAACTTCTGGCCAGTAGATTCTGCGCCTGCCTCGTCCCCT
CAGCTTTCACACGATGATACTCATTCACGCATTGAACATTATGCTAGCAGGCTAGCAGAAATGGAAAACAGCAAT
GGATCTTATCTAAATGATAGCATCTCTCCTAATGAGAGCATAGATGATGAACATTTGTTAATCCAGCATTACTGC
CAAAGTTTGAACCAGGACTCCCCCCTGAGCCAGCCTCGTAGTCCTGCCCAGATCTTGATTTCCTTAGAGAGTGAG
GAAAGAGGGGAGCTAGAGAGAATCCTAGCAGATCTTGAGGAAGAAAACAGGAATCTGCAAGCAGAATATGACCGT
CTAAAGCAGCAGCACGAACATAAAGGCCTGTCCCCACTGCCGTCCCCTCCTGAAATGATGCCCACCTCTCCCCAG
AGTCCCCGGGATGCTGAGCTCATTGCTGAGGCCAAGCTACTGCGTCAACACAAAGGCCGCCTGGAAGCCAGGATG
CAAATCCTGGAAGACCACAATAAACAGCTGGAGTCACAGTTACACAGGCTAAGGCAGCTGCTGGAGCAACCCCAG
GCAGAGGCCAAAGTGAATGGCACAACGGTGTCCTCTCCTTCTACCTCTCTACAGAGGTCCGACAGCAGTCAGCCT
ATGCTGCTCCGAGTGGTTGGCAGTCAAACTTCGGACTCCATGGGTGAGGAAGATCTTCTCAGTCCTCCCCAGGAC
ACAAGCACAGGGTTAGAGGAGGTGATGGAGCAACTCAACAACTCCTTCCCTAGTTCAAGAGGAAGAAATACCCCT
GGAAAGCCAATGAGAGAGGACACAATG
Human sequences with codon optimization:
(SEQ ID NO: 144)
ATGGCCAAGTACGGCGAGCACGAGGCCAGCCCCGACAACGGCCAGAACGAGTTCAGCGACATCATCAAGAGCCGG
AGCGACGAGCACAACGACGTGCAGAAGAAGACCTTCACCAAGTGGATCAACGCCCGGTTCAGCAAGAGCGGCAAG
CCCCCCATCAACGACATGTTCACCGACCTGAAGGACGGCCGGAAGCTGCTGGACCTGCTGGAGGGCCTGACCGGC
ACCAGCCTGCCCAAGGAGCGGGGCAGCACCCGGGTGCACGCCCTGAACAACGTGAACCGGGTGCTGCAGGTGCTG
CACCAGAACAACGTGGAGCTGGTGAACATCGGCGGCACCGACATCGTGGACGGCAACCACAAGCTGACCCTGGGC
CTGCTGTGGAGCATCATCCTGCACTGGCAGGTGAAGGACGTGATGAAGGACGTGATGAGCGACCTGCAGCAGACC
AACAGCGAGAAGATCCTGCTGAGCTGGGTGCGGCAGACCACCCGGCCCTACAGCCAGGTGAACGTGCTGAACTTC
ACCACCAGCTGGACCGACGGCCTGGCCTTCAACGCCGTGCTGCACCGGCACAAGCCCGACCTGTTCAGCTGGGAC
AAGGTGGTGAAGATGAGCCCCATCGAGCGGCTGGAGCACGCCTTCAGCAAGGCCCAGACCTACCTGGGCATCGAG
AAGCTGCTGGACCCCGAGGACGTGGCCGTGCAGCTGCCCGACAAGAAGAGCATCATCATGTACCTGACCAGCCTG
TTCGAGGTGCTGCCCCAGCAGGTGACCATCGACGCCATCCGGGAGGTGGAGACCCTGCCCCGGAAGTACAAGAAG
GAGTGCGAGGAGGAGGCCATCAACATCCAGAGCACCGCCCCCGAGGAGGAGCACGAGAGCCCCCGGGCCGAGACC
CCCAGCACCGTGACCGAGGTGGACATGGACCTGGACAGCTACCAGATCGCCCTGGAGGAGGTGCTGACCTGGCTG
CTGAGCGCCGAGGACACCTTCCAGGAGCAGGACGACATCAGCGACGACGTGGAGGAGGTGAAGGACCAGTTCGCC
ACCCACGAGGCCTTCATGATGGAGCTGACCGCCCACCAGAGCAGCGTGGGCAGCGTGCTGCAGGCCGGCAACCAG
CTGATCACCCAGGGCACCCTGAGCGACGAGGAGGAGTTCGAGATCCAGGAGCAGATGACCCTGCTGAACGCCCGG
TGGGAGGCCCTGCGGGTGGAGAGCATGGACCGGCAGAGCCGGCTGCACGACGTGCTGATGGAGCTGCAGAAGAAG
CAGCTGCAGCAGCTGAGCGCCTGGCTGACCCTGACCGAGGAGCGGATCCAGAAGATGGAGACCTGCCCCCTGGAC
GACGACGTGAAGAGCCTGCAGAAGCTGCTGGAGGAGCACAAGAGCCTGCAGAGCGACCTGGAGGCCGAGCAGGTG
AAGGTGAACAGCCTGACCCACATGGTGGTGATCGTGGACGAGAACAGCGGCGAGAGCGCCACCGCCATCCTGGAG
GACCAGCTGCAGAAGCTGGGCGAGCGGTGGACCGCCGTGTGCCGGTGGACCGAGGAGCGGTGGAACCGGCTGCAG
GAGATCAACATCCTGTGGCAGGAGCTGCTGGAGGAGCAGTGCCTGCTGAAGGCCTGGCTGACCGAGAAGGAGGAG
GCCCTGAACAAGGTGCAGACCAGCAACTTCAAGGACCAGAAGGAGCTGAGCGTGAGCGTGCGGCGGCTGGCCATC
CTGAAGGAGGACATGGAGATGAAGCGGCAGACCCTGGACCAGCTGAGCGAGATCGGCCAGGACGTGGGCCAGCTG
CTGGACAACAGCAAGGCCAGCAAGAAGATCAACAGCGACAGCGAGGAGCTGACCCAGCGGTGGGACAGCCTGGTG
CAGCGGCTGGAGGACAGCAGCAACCAGGTGACCCAGGCCGTGGCCAAGCTGGGCATGAGCCAGATCCCCCAGAAG
GACCTGCTGGAGACCGTGCGGGTGCGGGAGCAGGCCATCACCAAGAAGAGCAAGCAGGAGGCCGCTAGCGCCCAG
AGAAAAATAGATGAGACCCTTGAAAGACTCCGGGAACTTCAAGAGGCCACGGATGAGCTGGACCTCAAGCTGCGC
CAAGCTGAGGTGATCAAGGGATCCTGGCAGCCCGTGGGCGATCTCCTCATTGACTCTCTCCAAGATCACCTCGAG
AAAGTCAAGGCACTTCGAGGAGAAATTGCGCCTCTGAAAGAGAACGTGAGCCACGTCAATGACCTTGCTCGCCAG
CTTACCACTTTGGGCATTCAGCTCTCACCGTATAACCTCAGCACTCTGGAAGACCTGAACACCAGATGGAAGCTT
CTGCAGGTGGCCGTCGAGGACCGAGTCAGGCAGCTGCATGAAGCCCACAGGGACTTTGGTCCAGCATCTCAGCAC
TTTCTTTCCACGTCTGTCCAGGGTCCCTGGGAGAGAGCCATCTCGCCAAACAAAGTGCCCTACTATATCAACCAC
GAGACTCAAACAACTTGCTGGGACCATCCCAAAATGACAGAGCTCTACCAGTCTTTAGCTGACCTGAATAATGTC
AGATTCTCAGCTTATAGGACTGCCATGAAACTCCGAAGACTGCAGAAGGCCCTTTGCTTGGATCTCTTGAGCCTG
TCAGCTGCATGTGATGCCTTGGACCAGCACAACCTCAAGCAAAATGACCAGCCCATGGATATCCTGCAGATTATT
AATTGTTTGACCACTATTTATGACCGCCTGGAGCAAGAGCACAACAATTTGGTCAACGTCCCTCTCTGCGTGGAT
ATGTGTCTGAACTGGCTGCTGAATGTTTATGATACGGGACGAACAGGGAGGATCCGTGTCCTGTCTTTTAAAACT
GGCATCATTTCCCTGTGTAAAGCACATTTGGAAGACAAGTACAGATACCTTTTCAAGCAAGTGGCAAGTTCAACA
GGATTTTGTGACCAGCGCAGGCTGGGCCTCCTTCTGCATGATTCTATCCAAATTCCAAGACAGTTGGGTGAAGTT
GCATCCTTTGGGGGCAGTAACATTGAGCCAAGTGTCCGGAGCTGCTTCCAATTTGCTAATAATAAGCCAGAGATC
GAAGCGGCCCTCTTCCTAGACTGGATGAGACTGGAACCCCAGTCCATGGTGTGGCTGCCCGTCCTGCACAGAGTG
GCTGCTGCAGAAACTGCCAAGCATCAGGCCAAATGTAACATCTGCAAAGAGTGTCCAATCATTGGATTCAGGTAC
AGGAGTCTAAAGCACTTTAATTATGACATCTGCCAAAGCTGCTTTTTTTCTGGTCGAGTTGCAAAAGGCCATAAA
ATGCACTATCCCATGGTGGAATATTGCACTCCGACTACATCAGGAGAAGATGTTCGAGACTTTGCCAAGGTACTA
AAAAACAAATTTCGAACCAAAAGGTATTTTGCGAAGCATCCCCGAATGGGCTACCTGCCAGTGCAGACTGTCTTA
GAGGGGGACAACATGGAAACTCCCGTTACTCTGATCAACTTCTGGCCAGTAGATTCTGCGCCTGCCTCGTCCCCT
CAGCTTTCACACGATGATACTCATTCACGCATTGAACATTATGCTAGCAGGCTAGCAGAAATGGAAAACAGCAAT
GGATCTTATCTAAATGATAGCATCTCTCCTAATGAGAGCATAGATGATGAACATTTGTTAATCCAGCATTACTGC
CAAAGTTTGAACCAGGACTCCCCCCTGAGCCAGCCTCGTAGTCCTGCCCAGATCTTGATTTCCTTAGAGAGTGAG
GAAAGAGGGGAGCTAGAGAGAATCCTAGCAGATCTTGAGGAAGAAAACAGGAATCTGCAAGCAGAATATGACCGT
CTAAAGCAGCAGCACGAACATAAAGGCCTGTCCCCACTGCCGTCCCCTCCTGAAATGATGCCCACCTCTCCCCAG
AGTCCCCGGGATGCTGAGCTCATTGCTGAGGCCAAGCTACTGCGTCAACACAAAGGCCGCCTGGAAGCCAGGATG
CAAATCCTGGAAGACCACAATAAACAGCTGGAGTCACAGTTACACAGGCTAAGGCAGCTGCTGGAGCAACCCCAG
GCAGAGGCCAAAGTGAATGGCACAACGGTGTCCTCTCCTTCTACCTCTCTACAGAGGTCCGACAGCAGTCAGCCT
ATGCTGCTCCGAGTGGTTGGCAGTCAAACTTCGGACTCCATGGGTGAGGAAGATCTTCTCAGTCCTCCCCAGGAC
ACAAGCACAGGGTTAGAGGAGGTGATGGAGCAACTCAACAACTCCTTCCCTAGTTCAAGAGGAAGAAATACCCCT
GGAAAGCCAATGAGAGAGGACACAATG
Utrophin N-terminus through R3_Dystrophin R23 to end:
Human sequences without codon alterations:
(SEQ ID NO: 145)
ATGGCCAAGTATGGAGAACATGAAGCCAGTCCTGACAATGGGCAGAACGAATTCAGTGATATCATTAAGTCCAGA
TCTGATGAACACAATGACGTACAGAAGAAAACCTTTACCAAATGGATAAATGCTCGATTTTCAAAGAGTGGGAAA
CCACCCATCAATGATATGTTCACAGACCTCAAAGATGGAAGGAAGCTATTGGATCTTCTAGAAGGCCTCACAGGA
ACATCACTGCCAAAGGAACGTGGTTCCACAAGGGTACATGCCTTAAATAACGTCAACAGAGTGCTGCAGGTTTTA
CATCAGAACAATGTGGAATTAGTGAATATAGGGGGAACTGACATTGTGGATGGAAATCACAAACTGACTTTGGGG
TTACTTTGGAGCATCATTTTGCACTGGCAGGTGAAAGATGTCATGAAGGATGTCATGTCGGACCTGCAGCAGACG
AACAGTGAGAAGATCCTGCTCAGCTGGGTGCGTCAGACCACCAGGCCCTACAGCCAAGTCAACGTCCTCAACTTC
ACCACCAGCTGGACAGATGGACTCGCCTTTAATGCTGTCCTCCACCGACATAAACCTGATCTCTTCAGCTGGGAT
AAAGTTGTCAAAATGTCACCAATTGAGAGACTTGAACATGCCTTCAGCAAGGCTCAAACTTATTTGGGAATTGAA
AAGCTGTTAGATCCTGAAGATGTTGCCGTTCAGCTTCCTGACAAGAAATCCATAATTATGTATTTAACATCTTTG
TTTGAGGTGCTACCTCAGCAAGTCACCATAGACGCCATCCGTGAGGTAGAGACACTCCCAAGGAAATATAAAAAA
GAATGTGAAGAAGAGGCAATTAATATACAGAGTACAGCGCCTGAGGAGGAGCATGAGAGTCCCCGAGCTGAAACT
CCCAGCACTGTCACTGAGGTTGACATGGATCTGGACAGCTATCAGATTGCGTTGGAGGAAGTGCTGACCTGGTTG
CTTTCTGCTGAGGACACTTTCCAGGAGCAGGATGATATTTCTGATGATGTTGAAGAAGTCAAAGACCAGTTTGCA
ACCCATGAAGCTTTTATGATGGAACTGACTGCACACCAGAGCAGTGTGGGCAGCGTCCTGCAGGCAGGCAACCAA
CTGATAACACAAGGAACTCTGTCAGACGAAGAAGAATTTGAGATTCAGGAACAGATGACCCTGCTGAATGCTAGA
TGGGAGGCTCTTAGGGTGGAGAGTATGGACAGACAGTCCCGGCTGCACGATGTGCTGATGGAACTGCAGAAGAAG
CAACTGCAGCAGCTCTCCGCCTGGTTAACACTCACAGAGGAGCGCATTCAGAAGATGGAAACTTGCCCCCTGGAT
GATGATGTAAAATCTCTACAAAAGCTGCTAGAAGAACATAAAAGTTTGCAAAGTGATCTTGAGGCTGAACAGGTG
AAAGTAAATTCACTAACTCACATGGTGGTCATTGTTGATGAAAACAGTGGTGAGAGTGCTACAGCTATCCTAGAA
GACCAGTTACAGAAACTTGGTGAGCGCTGGACAGCAGTATGCCGTTGGACTGAAGAACGCTGGAATAGGTTACAA
GAAATCAATATATTGTGGCAGGAATTATTGGAAGAACAGTGCTTGTTGAAAGCTTGGTTAACCGAAAAAGAAGAG
GCTTTAAATAAAGTCCAGACAAGCAACTTCAAAGACCAAAAGGAACTAAGTGTCAGTGTTCGACGTCTGGCTATT
TTGAAGGAAGACATGGAAATGAAGCGTCAAACATTGGATCAGCTGAGTGAGATTGGCCAGGATGTGGGACAATTA
CTTGATAATTCCAAGGCATCTAAGAAGATCAACAGTGACTCAGAGGAACTGACTCAAAGATGGGATTCTTTGGTT
CAGAGACTAGAAGATTCCTCCAACCAGGTGACTCAGGCTGCCGCTAGCGCCAGTTCTGACCAGTGGAAGCGTCTG
CACCTTTCTCTGCAGGAACTTCTGGTGTGGCTACAGCTGAAAGATGATGAATTAAGCCGGCAGGCACCTATTGGA
GGCGACTTTCCAGCAGTTCAGAAGCAGAACGATGTACATAGGGCCTTCAAGAGGGAATTGAAAACTAAAGAACCT
GTAATCATGAGTACTCTTGAGACTGTACGAATATTTCTGACAGAGCAGCCTTTGGAAGGACTAGAGAAACTCTAC
CAGGAGCCCAGAGAGCTGCCTCCTGAGGAGAGAGCCCAGAATGTCACTCGGCTTCTACGAAAGCAGGCTGAGGAG
GTCAATACTGAGTGGGAAAAATTGAACCTGCACTCCGCTGACCAGAGAAAAATAGATGAGACCCTTGAAAGACTC
CGGGAACTTCAAGAGGCCACGGATGAGCTGGACCTCAAGCTGCGCCAAGCTGAGGTGATCAAGGGATCCTGGCAG
CCCGTGGGCGATCTCCTCATTGACTCTCTCCAAGATCACCTCGAGAAAGTCAAGGCACTTCGAGGAGAAATTGCG
CCTCTGAAAGAGAACGTGAGCCACGTCAATGACCTTGCTCGCCAGCTTACCACTTTGGGCATTCAGCTCTCACCG
TATAACCTCAGCACTCTGGAAGACCTGAACACCAGATGGAAGCTTCTGCAGGTGGCCGTCGAGGACCGAGTCAGG
CAGCTGCATGAAGCCCACAGGGACTTTGGTCCAGCATCTCAGCACTTTCTTTCCACGTCTGTCCAGGGTCCCTGG
GAGAGAGCCATCTCGCCAAACAAAGTGCCCTACTATATCAACCACGAGACTCAAACAACTTGCTGGGACCATCCC
AAAATGACAGAGCTCTACCAGTCTTTAGCTGACCTGAATAATGTCAGATTCTCAGCTTATAGGACTGCCATGAAA
CTCCGAAGACTGCAGAAGGCCCTTTGCTTGGATCTCTTGAGCCTGTCAGCTGCATGTGATGCCTTGGACCAGCAC
AACCTCAAGCAAAATGACCAGCCCATGGATATCCTGCAGATTATTAATTGTTTGACCACTATTTATGACCGCCTG
GAGCAAGAGCACAACAATTTGGTCAACGTCCCTCTCTGCGTGGATATGTGTCTGAACTGGCTGCTGAATGTTTAT
GATACGGGACGAACAGGGAGGATCCGTGTCCTGTCTTTTAAAACTGGCATCATTTCCCTGTGTAAAGCACATTTG
GAAGACAAGTACAGATACCTTTTCAAGCAAGTGGCAAGTTCAACAGGATTTTGTGACCAGCGCAGGCTGGGCCTC
CTTCTGCATGATTCTATCCAAATTCCAAGACAGTTGGGTGAAGTTGCATCCTTTGGGGGCAGTAACATTGAGCCA
AGTGTCCGGAGCTGCTTCCAATTTGCTAATAATAAGCCAGAGATCGAAGCGGCCCTCTTCCTAGACTGGATGAGA
CTGGAACCCCAGTCCATGGTGTGGCTGCCCGTCCTGCACAGAGTGGCTGCTGCAGAAACTGCCAAGCATCAGGCC
AAATGTAACATCTGCAAAGAGTGTCCAATCATTGGATTCAGGTACAGGAGTCTAAAGCACTTTAATTATGACATC
TGCCAAAGCTGCTTTTTTTCTGGTCGAGTTGCAAAAGGCCATAAAATGCACTATCCCATGGTGGAATATTGCACT
CCGACTACATCAGGAGAAGATGTTCGAGACTTTGCCAAGGTACTAAAAAACAAATTTCGAACCAAAAGGTATTTT
GCGAAGCATCCCCGAATGGGCTACCTGCCAGTGCAGACTGTCTTAGAGGGGGACAACATGGAAACTCCCGTTACT
CTGATCAACTTCTGGCCAGTAGATTCTGCGCCTGCCTCGTCCCCTCAGCTTTCACACGATGATACTCATTCACGC
ATTGAACATTATGCTAGCAGGCTAGCAGAAATGGAAAACAGCAATGGATCTTATCTAAATGATAGCATCTCTCCT
AATGAGAGCATAGATGATGAACATTTGTTAATCCAGCATTACTGCCAAAGTTTGAACCAGGACTCCCCCCTGAGC
CAGCCTCGTAGTCCTGCCCAGATCTTGATTTCCTTAGAGAGTGAGGAAAGAGGGGAGCTAGAGAGAATCCTAGCA
GATCTTGAGGAAGAAAACAGGAATCTGCAAGCAGAATATGACCGTCTAAAGCAGCAGCACGAACATAAAGGCCTG
TCCCCACTGCCGTCCCCTCCTGAAATGATGCCCACCTCTCCCCAGAGTCCCCGGGATGCTGAGCTCATTGCTGAG
GCCAAGCTACTGCGTCAACACAAAGGCCGCCTGGAAGCCAGGATGCAAATCCTGGAAGACCACAATAAACAGCTG
GAGTCACAGTTACACAGGCTAAGGCAGCTGCTGGAGCAACCCCAGGCAGAGGCCAAAGTGAATGGCACAACGGTG
TCCTCTCCTTCTACCTCTCTACAGAGGTCCGACAGCAGTCAGCCTATGCTGCTCCGAGTGGTTGGCAGTCAAACT
TCGGACTCCATGGGTGAGGAAGATCTTCTCAGTCCTCCCCAGGACACAAGCACAGGGTTAGAGGAGGTGATGGAG
CAACTCAACAACTCCTTCCCTAGTTCAAGAGGAAGAAATACCCCTGGAAAGCCAATGAGAGAGGACACAATG
Human sequences with codon optimization:
(SEQ ID NO: 146)
ATGGCCAAGTACGGCGAGCACGAGGCCAGCCCCGACAACGGCCAGAACGAGTTCAGCGACATCATCAAGAGCCGG
AGCGACGAGCACAACGACGTGCAGAAGAAGACCTTCACCAAGTGGATCAACGCCCGGTTCAGCAAGAGCGGCAAG
CCCCCCATCAACGACATGTTCACCGACCTGAAGGACGGCCGGAAGCTGCTGGACCTGCTGGAGGGCCTGACCGGC
ACCAGCCTGCCCAAGGAGCGGGGCAGCACCCGGGTGCACGCCCTGAACAACGTGAACCGGGTGCTGCAGGTGCTG
CACCAGAACAACGTGGAGCTGGTGAACATCGGCGGCACCGACATCGTGGACGGCAACCACAAGCTGACCCTGGGC
CTGCTGTGGAGCATCATCCTGCACTGGCAGGTGAAGGACGTGATGAAGGACGTGATGAGCGACCTGCAGCAGACC
AACAGCGAGAAGATCCTGCTGAGCTGGGTGCGGCAGACCACCCGGCCCTACAGCCAGGTGAACGTGCTGAACTTC
ACCACCAGCTGGACCGACGGCCTGGCCTTCAACGCCGTGCTGCACCGGCACAAGCCCGACCTGTTCAGCTGGGAC
AAGGTGGTGAAGATGAGCCCCATCGAGCGGCTGGAGCACGCCTTCAGCAAGGCCCAGACCTACCTGGGCATCGAG
AAGCTGCTGGACCCCGAGGACGTGGCCGTGCAGCTGCCCGACAAGAAGAGCATCATCATGTACCTGACCAGCCTG
TTCGAGGTGCTGCCCCAGCAGGTGACCATCGACGCCATCCGGGAGGTGGAGACCCTGCCCCGGAAGTACAAGAAG
GAGTGCGAGGAGGAGGCCATCAACATCCAGAGCACCGCCCCCGAGGAGGAGCACGAGAGCCCCCGGGCCGAGACC
CCCAGCACCGTGACCGAGGTGGACATGGACCTGGACAGCTACCAGATCGCCCTGGAGGAGGTGCTGACCTGGCTG
CTGAGCGCCGAGGACACCTTCCAGGAGCAGGACGACATCAGCGACGACGTGGAGGAGGTGAAGGACCAGTTCGCC
ACCCACGAGGCCTTCATGATGGAGCTGACCGCCCACCAGAGCAGCGTGGGCAGCGTGCTGCAGGCCGGCAACCAG
CTGATCACCCAGGGCACCCTGAGCGACGAGGAGGAGTTCGAGATCCAGGAGCAGATGACCCTGCTGAACGCCCGG
TGGGAGGCCCTGCGGGTGGAGAGCATGGACCGGCAGAGCCGGCTGCACGACGTGCTGATGGAGCTGCAGAAGAAG
CAGCTGCAGCAGCTGAGCGCCTGGCTGACCCTGACCGAGGAGCGGATCCAGAAGATGGAGACCTGCCCCCTGGAC
GACGACGTGAAGAGCCTGCAGAAGCTGCTGGAGGAGCACAAGAGCCTGCAGAGCGACCTGGAGGCCGAGCAGGTG
AAGGTGAACAGCCTGACCCACATGGTGGTGATCGTGGACGAGAACAGCGGCGAGAGCGCCACCGCCATCCTGGAG
GACCAGCTGCAGAAGCTGGGCGAGCGGTGGACCGCCGTGTGCCGGTGGACCGAGGAGCGGTGGAACCGGCTGCAG
GAGATCAACATCCTGTGGCAGGAGCTGCTGGAGGAGCAGTGCCTGCTGAAGGCCTGGCTGACCGAGAAGGAGGAG
GCCCTGAACAAGGTGCAGACCAGCAACTTCAAGGACCAGAAGGAGCTGAGCGTGAGCGTGCGGCGGCTGGCCATC
CTGAAGGAGGACATGGAGATGAAGCGGCAGACCCTGGACCAGCTGAGCGAGATCGGCCAGGACGTGGGCCAGCTG
CTGGACAACAGCAAGGCCAGCAAGAAGATCAACAGCGACAGCGAGGAGCTGACCCAGCGGTGGGACAGCCTGGTG
CAGCGGCTGGAGGACAGCAGCAACCAGGTGACCCAGGCCGCCGCTAGCGCCAGCAGCGACCAGTGGAAGCGGCTG
CACCTGAGCCTGCAGGAGCTGCTGGTGTGGCTGCAGCTGAAGGACGACGAGCTGAGCCGGCAGGCCCCCATCGGC
GGCGACTTCCCCGCCGTGCAGAAGCAGAACGACGTGCACCGGGCCTTCAAGCGGGAGCTGAAGACCAAGGAGCCC
GTGATCATGAGCACCCTGGAGACCGTGCGGATCTTCCTGACCGAGCAGCCCCTGGAGGGCCTGGAGAAGCTGTAC
CAGGAGCCCCGGGAGCTGCCCCCCGAGGAGCGGGCCCAGAACGTGACCCGGCTGCTGCGGAAGCAGGCCGAGGAG
GTGAACACCGAGTGGGAGAAGCTGAACCTGCACAGCGCCGACCAGAGAAAAATAGATGAGACCCTTGAAAGACTC
CGGGAACTTCAAGAGGCCACGGATGAGCTGGACCTCAAGCTGCGCCAAGCTGAGGTGATCAAGGGATCCTGGCAG
CCCGTGGGCGATCTCCTCATTGACTCTCTCCAAGATCACCTCGAGAAAGTCAAGGCACTTCGAGGAGAAATTGCG
CCTCTGAAAGAGAACGTGAGCCACGTCAATGACCTTGCTCGCCAGCTTACCACTTTGGGCATTCAGCTCTCACCG
TATAACCTCAGCACTCTGGAAGACCTGAACACCAGATGGAAGCTTCTGCAGGTGGCCGTCGAGGACCGAGTCAGG
CAGCTGCATGAAGCCCACAGGGACTTTGGTCCAGCATCTCAGCACTTTCTTTCCACGTCTGTCCAGGGTCCCTGG
GAGAGAGCCATCTCGCCAAACAAAGTGCCCTACTATATCAACCACGAGACTCAAACAACTTGCTGGGACCATCCC
AAAATGACAGAGCTCTACCAGTCTTTAGCTGACCTGAATAATGTCAGATTCTCAGCTTATAGGACTGCCATGAAA
CTCCGAAGACTGCAGAAGGCCCTTTGCTTGGATCTCTTGAGCCTGTCAGCTGCATGTGATGCCTTGGACCAGCAC
AACCTCAAGCAAAATGACCAGCCCATGGATATCCTGCAGATTATTAATTGTTTGACCACTATTTATGACCGCCTG
GAGCAAGAGCACAACAATTTGGTCAACGTCCCTCTCTGCGTGGATATGTGTCTGAACTGGCTGCTGAATGTTTAT
GATACGGGACGAACAGGGAGGATCCGTGTCCTGTCTTTTAAAACTGGCATCATTTCCCTGTGTAAAGCACATTTG
GAAGACAAGTACAGATACCTTTTCAAGCAAGTGGCAAGTTCAACAGGATTTTGTGACCAGCGCAGGCTGGGCCTC
CTTCTGCATGATTCTATCCAAATTCCAAGACAGTTGGGTGAAGTTGCATCCTTTGGGGGCAGTAACATTGAGCCA
AGTGTCCGGAGCTGCTTCCAATTTGCTAATAATAAGCCAGAGATCGAAGCGGCCCTCTTCCTAGACTGGATGAGA
CTGGAACCCCAGTCCATGGTGTGGCTGCCCGTCCTGCACAGAGTGGCTGCTGCAGAAACTGCCAAGCATCAGGCC
AAATGTAACATCTGCAAAGAGTGTCCAATCATTGGATTCAGGTACAGGAGTCTAAAGCACTTTAATTATGACATC
TGCCAAAGCTGCTTTTTTTCTGGTCGAGTTGCAAAAGGCCATAAAATGCACTATCCCATGGTGGAATATTGCACT
CCGACTACATCAGGAGAAGATGTTCGAGACTTTGCCAAGGTACTAAAAAACAAATTTCGAACCAAAAGGTATTTT
GCGAAGCATCCCCGAATGGGCTACCTGCCAGTGCAGACTGTCTTAGAGGGGGACAACATGGAAACTCCCGTTACT
CTGATCAACTTCTGGCCAGTAGATTCTGCGCCTGCCTCGTCCCCTCAGCTTTCACACGATGATACTCATTCACGC
ATTGAACATTATGCTAGCAGGCTAGCAGAAATGGAAAACAGCAATGGATCTTATCTAAATGATAGCATCTCTCCT
AATGAGAGCATAGATGATGAACATTTGTTAATCCAGCATTACTGCCAAAGTTTGAACCAGGACTCCCCCCTGAGC
CAGCCTCGTAGTCCTGCCCAGATCTTGATTTCCTTAGAGAGTGAGGAAAGAGGGGAGCTAGAGAGAATCCTAGCA
GATCTTGAGGAAGAAAACAGGAATCTGCAAGCAGAATATGACCGTCTAAAGCAGCAGCACGAACATAAAGGCCTG
TCCCCACTGCCGTCCCCTCCTGAAATGATGCCCACCTCTCCCCAGAGTCCCCGGGATGCTGAGCTCATTGCTGAG
GCCAAGCTACTGCGTCAACACAAAGGCCGCCTGGAAGCCAGGATGCAAATCCTGGAAGACCACAATAAACAGCTG
GAGTCACAGTTACACAGGCTAAGGCAGCTGCTGGAGCAACCCCAGGCAGAGGCCAAAGTGAATGGCACAACGGTG
TCCTCTCCTTCTACCTCTCTACAGAGGTCCGACAGCAGTCAGCCTATGCTGCTCCGAGTGGTTGGCAGTCAAACT
TCGGACTCCATGGGTGAGGAAGATCTTCTCAGTCCTCCCCAGGACACAAGCACAGGGTTAGAGGAGGTGATGGAG
CAACTCAACAACTCCTTCCCTAGTTCAAGAGGAAGAAATACCCCTGGAAAGCCAATGAGAGAGGACACAATG
Utrophin N-terminus through R3_Dystrophin R23 + H4 to 1st coiled coil and proline
rich region that follows:
Human sequences without codon alterations:
(SEQ ID NO: 147)
ATGGCCAAGTATGGAGAACATGAAGCCAGTCCTGACAATGGGCAGAACGAATTCAGTGATATCATTAAGTCCAGA
TCTGATGAACACAATGACGTACAGAAGAAAACCTTTACCAAATGGATAAATGCTCGATTTTCAAAGAGTGGGAAA
CCACCCATCAATGATATGTTCACAGACCTCAAAGATGGAAGGAAGCTATTGGATCTTCTAGAAGGCCTCACAGGA
ACATCACTGCCAAAGGAACGTGGTTCCACAAGGGTACATGCCTTAAATAACGTCAACAGAGTGCTGCAGGTTTTA
CATCAGAACAATGTGGAATTAGTGAATATAGGGGGAACTGACATTGTGGATGGAAATCACAAACTGACTTTGGGG
TTACTTTGGAGCATCATTTTGCACTGGCAGGTGAAAGATGTCATGAAGGATGTCATGTCGGACCTGCAGCAGACG
AACAGTGAGAAGATCCTGCTCAGCTGGGTGCGTCAGACCACCAGGCCCTACAGCCAAGTCAACGTCCTCAACTTC
ACCACCAGCTGGACAGATGGACTCGCCTTTAATGCTGTCCTCCACCGACATAAACCTGATCTCTTCAGCTGGGAT
AAAGTTGTCAAAATGTCACCAATTGAGAGACTTGAACATGCCTTCAGCAAGGCTCAAACTTATTTGGGAATTGAA
AAGCTGTTAGATCCTGAAGATGTTGCCGTTCAGCTTCCTGACAAGAAATCCATAATTATGTATTTAACATCTTTG
TTTGAGGTGCTACCTCAGCAAGTCACCATAGACGCCATCCGTGAGGTAGAGACACTCCCAAGGAAATATAAAAAA
GAATGTGAAGAAGAGGCAATTAATATACAGAGTACAGCGCCTGAGGAGGAGCATGAGAGTCCCCGAGCTGAAACT
CCCAGCACTGTCACTGAGGTTGACATGGATCTGGACAGCTATCAGATTGCGTTGGAGGAAGTGCTGACCTGGTTG
CTTTCTGCTGAGGACACTTTCCAGGAGCAGGATGATATTTCTGATGATGTTGAAGAAGTCAAAGACCAGTTTGCA
ACCCATGAAGCTTTTATGATGGAACTGACTGCACACCAGAGCAGTGTGGGCAGCGTCCTGCAGGCAGGCAACCAA
CTGATAACACAAGGAACTCTGTCAGACGAAGAAGAATTTGAGATTCAGGAACAGATGACCCTGCTGAATGCTAGA
TGGGAGGCTCTTAGGGTGGAGAGTATGGACAGACAGTCCCGGCTGCACGATGTGCTGATGGAACTGCAGAAGAAG
CAACTGCAGCAGCTCTCCGCCTGGTTAACACTCACAGAGGAGCGCATTCAGAAGATGGAAACTTGCCCCCTGGAT
GATGATGTAAAATCTCTACAAAAGCTGCTAGAAGAACATAAAAGTTTGCAAAGTGATCTTGAGGCTGAACAGGTG
AAAGTAAATTCACTAACTCACATGGTGGTCATTGTTGATGAAAACAGTGGTGAGAGTGCTACAGCTATCCTAGAA
GACCAGTTACAGAAACTTGGTGAGCGCTGGACAGCAGTATGCCGTTGGACTGAAGAACGCTGGAATAGGTTACAA
GAAATCAATATATTGTGGCAGGAATTATTGGAAGAACAGTGCTTGTTGAAAGCTTGGTTAACCGAAAAAGAAGAG
GCTTTAAATAAAGTCCAGACAAGCAACTTCAAAGACCAAAAGGAACTAAGTGTCAGTGTTCGACGTCTGGCTATT
TTGAAGGAAGACATGGAAATGAAGCGTCAAACATTGGATCAGCTGAGTGAGATTGGCCAGGATGTGGGACAATTA
CTTGATAATTCCAAGGCATCTAAGAAGATCAACAGTGACTCAGAGGAACTGACTCAAAGATGGGATTCTTTGGTT
CAGAGACTAGAAGATTCCTCCAACCAGGTGACTCAGGCTGCCGCTAGCGCCAGTTCTGACCAGTGGAAGCGTCTG
CACCTTTCTCTGCAGGAACTTCTGGTGTGGCTACAGCTGAAAGATGATGAATTAAGCCGGCAGGCACCTATTGGA
GGCGACTTTCCAGCAGTTCAGAAGCAGAACGATGTACATAGGGCCTTCAAGAGGGAATTGAAAACTAAAGAACCT
GTAATCATGAGTACTCTTGAGACTGTACGAATATTTCTGACAGAGCAGCCTTTGGAAGGACTAGAGAAACTCTAC
CAGGAGCCCAGAGAGCTGCCTCCTGAGGAGAGAGCCCAGAATGTCACTCGGCTTCTACGAAAGCAGGCTGAGGAG
GTCAATACTGAGTGGGAAAAATTGAACCTGCACTCCGCTGACCAGAGAAAAATAGATGAGACCCTTGAAAGACTC
CGGGAACTTCAAGAGGCCACGGATGAGCTGGACCTCAAGCTGCGCCAAGCTGAGGTGATCAAGGGATCCTGGCAG
CCCGTGGGCGATCTCCTCATTGACTCTCTCCAAGATCACCTCGAGAAAGTCAAGGCACTTCGAGGAGAAATTGCG
CCTCTGAAAGAGAACGTGAGCCACGTCAATGACCTTGCTCGCCAGCTTACCACTTTGGGCATTCAGCTCTCACCG
TATAACCTCAGCACTCTGGAAGACCTGAACACCAGATGGAAGCTTCTGCAGGTGGCCGTCGAGGACCGAGTCAGG
CAGCTGCATGAAGCCCACAGGGACTTTGGTCCAGCATCTCAGCACTTTCTTTCCACGTCTGTCCAGGGTCCCTGG
GAGAGAGCCATCTCGCCAAACAAAGTGCCCTACTATATCAACCACGAGACTCAAACAACTTGCTGGGACCATCCC
AAAATGACAGAGCTCTACCAGTCTTTAGCTGACCTGAATAATGTCAGATTCTCAGCTTATAGGACTGCCATGAAA
CTCCGAAGACTGCAGAAGGCCCTTTGCTTGGATCTCTTGAGCCTGTCAGCTGCATGTGATGCCTTGGACCAGCAC
AACCTCAAGCAAAATGACCAGCCCATGGATATCCTGCAGATTATTAATTGTTTGACCACTATTTATGACCGCCTG
GAGCAAGAGCACAACAATTTGGTCAACGTCCCTCTCTGCGTGGATATGTGTCTGAACTGGCTGCTGAATGTTTAT
GATACGGGACGAACAGGGAGGATCCGTGTCCTGTCTTTTAAAACTGGCATCATTTCCCTGTGTAAAGCACATTTG
GAAGACAAGTACAGATACCTTTTCAAGCAAGTGGCAAGTTCAACAGGATTTTGTGACCAGCGCAGGCTGGGCCTC
CTTCTGCATGATTCTATCCAAATTCCAAGACAGTTGGGTGAAGTTGCATCCTTTGGGGGCAGTAACATTGAGCCA
AGTGTCCGGAGCTGCTTCCAATTTGCTAATAATAAGCCAGAGATCGAAGCGGCCCTCTTCCTAGACTGGATGAGA
CTGGAACCCCAGTCCATGGTGTGGCTGCCCGTCCTGCACAGAGTGGCTGCTGCAGAAACTGCCAAGCATCAGGCC
AAATGTAACATCTGCAAAGAGTGTCCAATCATTGGATTCAGGTACAGGAGTCTAAAGCACTTTAATTATGACATC
TGCCAAAGCTGCTTTTTTTCTGGTCGAGTTGCAAAAGGCCATAAAATGCACTATCCCATGGTGGAATATTGCACT
CCGACTACATCAGGAGAAGATGTTCGAGACTTTGCCAAGGTACTAAAAAACAAATTTCGAACCAAAAGGTATTTT
GCGAAGCATCCCCGAATGGGCTACCTGCCAGTGCAGACTGTCTTAGAGGGGGACAACATGGAAACTCCCGTTACT
CTGATCAACTTCTGGCCAGTAGATTCTGCGCCTGCCTCGTCCCCTCAGCTTTCACACGATGATACTCATTCACGC
ATTGAACATTATGCTAGCAGGCTAGCAGAAATGGAAAACAGCAATGGATCTTATCTAAATGATAGCATCTCTCCT
AATGAGAGCATAGATGATGAACATTTGTTAATCCAGCATTACTGCCAAAGTTTGAACCAGGACTCCCCCCTGAGC
CAGCCTCGTAGTCCTGCCCAGATCTTGATTTCCTTAGAGAGTGAGGAAAGAGGGGAGCTAGAGAGAATCCTAGCA
GATCTTGAGGAAGAAAACAGGAATCTGCAAGCAGAATATGACCGTCTAAAGCAGCAGCACGAACATAAAGGCCTG
TCCCCACTGCCGTCCCCTCCTGAAATGATGCCCACCTCTCCCCAGAGTCCC
Human sequences with codon optimization:
(SEQ ID NO: 148)
ATGGCCAAGTACGGCGAGCACGAGGCCAGCCCCGACAACGGCCAGAACGAGTTCAGCGACATCATCAAGAGCCGG
AGCGACGAGCACAACGACGTGCAGAAGAAGACCTTCACCAAGTGGATCAACGCCCGGTTCAGCAAGAGCGGCAAG
CCCCCCATCAACGACATGTTCACCGACCTGAAGGACGGCCGGAAGCTGCTGGACCTGCTGGAGGGCCTGACCGGC
ACCAGCCTGCCCAAGGAGCGGGGCAGCACCCGGGTGCACGCCCTGAACAACGTGAACCGGGTGCTGCAGGTGCTG
CACCAGAACAACGTGGAGCTGGTGAACATCGGCGGCACCGACATCGTGGACGGCAACCACAAGCTGACCCTGGGC
CTGCTGTGGAGCATCATCCTGCACTGGCAGGTGAAGGACGTGATGAAGGACGTGATGAGCGACCTGCAGCAGACC
AACAGCGAGAAGATCCTGCTGAGCTGGGTGCGGCAGACCACCCGGCCCTACAGCCAGGTGAACGTGCTGAACTTC
ACCACCAGCTGGACCGACGGCCTGGCCTTCAACGCCGTGCTGCACCGGCACAAGCCCGACCTGTTCAGCTGGGAC
AAGGTGGTGAAGATGAGCCCCATCGAGCGGCTGGAGCACGCCTTCAGCAAGGCCCAGACCTACCTGGGCATCGAG
AAGCTGCTGGACCCCGAGGACGTGGCCGTGCAGCTGCCCGACAAGAAGAGCATCATCATGTACCTGACCAGCCTG
TTCGAGGTGCTGCCCCAGCAGGTGACCATCGACGCCATCCGGGAGGTGGAGACCCTGCCCCGGAAGTACAAGAAG
GAGTGCGAGGAGGAGGCCATCAACATCCAGAGCACCGCCCCCGAGGAGGAGCACGAGAGCCCCCGGGCCGAGACC
CCCAGCACCGTGACCGAGGTGGACATGGACCTGGACAGCTACCAGATCGCCCTGGAGGAGGTGCTGACCTGGCTG
CTGAGCGCCGAGGACACCTTCCAGGAGCAGGACGACATCAGCGACGACGTGGAGGAGGTGAAGGACCAGTTCGCC
ACCCACGAGGCCTTCATGATGGAGCTGACCGCCCACCAGAGCAGCGTGGGCAGCGTGCTGCAGGCCGGCAACCAG
CTGATCACCCAGGGCACCCTGAGCGACGAGGAGGAGTTCGAGATCCAGGAGCAGATGACCCTGCTGAACGCCCGG
TGGGAGGCCCTGCGGGTGGAGAGCATGGACCGGCAGAGCCGGCTGCACGACGTGCTGATGGAGCTGCAGAAGAAG
CAGCTGCAGCAGCTGAGCGCCTGGCTGACCCTGACCGAGGAGCGGATCCAGAAGATGGAGACCTGCCCCCTGGAC
GACGACGTGAAGAGCCTGCAGAAGCTGCTGGAGGAGCACAAGAGCCTGCAGAGCGACCTGGAGGCCGAGCAGGTG
AAGGTGAACAGCCTGACCCACATGGTGGTGATCGTGGACGAGAACAGCGGCGAGAGCGCCACCGCCATCCTGGAG
GACCAGCTGCAGAAGCTGGGCGAGCGGTGGACCGCCGTGTGCCGGTGGACCGAGGAGCGGTGGAACCGGCTGCAG
GAGATCAACATCCTGTGGCAGGAGCTGCTGGAGGAGCAGTGCCTGCTGAAGGCCTGGCTGACCGAGAAGGAGGAG
GCCCTGAACAAGGTGCAGACCAGCAACTTCAAGGACCAGAAGGAGCTGAGCGTGAGCGTGCGGCGGCTGGCCATC
CTGAAGGAGGACATGGAGATGAAGCGGCAGACCCTGGACCAGCTGAGCGAGATCGGCCAGGACGTGGGCCAGCTG
CTGGACAACAGCAAGGCCAGCAAGAAGATCAACAGCGACAGCGAGGAGCTGACCCAGCGGTGGGACAGCCTGGTG
CAGCGGCTGGAGGACAGCAGCAACCAGGTGACCCAGGCCGCCGCTAGCGCCAGCAGCGACCAGTGGAAGCGGCTG
CACCTGAGCCTGCAGGAGCTGCTGGTGTGGCTGCAGCTGAAGGACGACGAGCTGAGCCGGCAGGCCCCCATCGGC
GGCGACTTCCCCGCCGTGCAGAAGCAGAACGACGTGCACCGGGCCTTCAAGCGGGAGCTGAAGACCAAGGAGCCC
GTGATCATGAGCACCCTGGAGACCGTGCGGATCTTCCTGACCGAGCAGCCCCTGGAGGGCCTGGAGAAGCTGTAC
CAGGAGCCCCGGGAGCTGCCCCCCGAGGAGCGGGCCCAGAACGTGACCCGGCTGCTGCGGAAGCAGGCCGAGGAG
GTGAACACCGAGTGGGAGAAGCTGAACCTGCACAGCGCCGACCAGAGAAAAATAGATGAGACCCTTGAAAGACTC
CGGGAACTTCAAGAGGCCACGGATGAGCTGGACCTCAAGCTGCGCCAAGCTGAGGTGATCAAGGGATCCTGGCAG
CCCGTGGGCGATCTCCTCATTGACTCTCTCCAAGATCACCTCGAGAAAGTCAAGGCACTTCGAGGAGAAATTGCG
CCTCTGAAAGAGAACGTGAGCCACGTCAATGACCTTGCTCGCCAGCTTACCACTTTGGGCATTCAGCTCTCACCG
TATAACCTCAGCACTCTGGAAGACCTGAACACCAGATGGAAGCTTCTGCAGGTGGCCGTCGAGGACCGAGTCAGG
CAGCTGCATGAAGCCCACAGGGACTTTGGTCCAGCATCTCAGCACTTTCTTTCCACGTCTGTCCAGGGTCCCTGG
GAGAGAGCCATCTCGCCAAACAAAGTGCCCTACTATATCAACCACGAGACTCAAACAACTTGCTGGGACCATCCC
AAAATGACAGAGCTCTACCAGTCTTTAGCTGACCTGAATAATGTCAGATTCTCAGCTTATAGGACTGCCATGAAA
CTCCGAAGACTGCAGAAGGCCCTTTGCTTGGATCTCTTGAGCCTGTCAGCTGCATGTGATGCCTTGGACCAGCAC
AACCTCAAGCAAAATGACCAGCCCATGGATATCCTGCAGATTATTAATTGTTTGACCACTATTTATGACCGCCTG
GAGCAAGAGCACAACAATTTGGTCAACGTCCCTCTCTGCGTGGATATGTGTCTGAACTGGCTGCTGAATGTTTAT
GATACGGGACGAACAGGGAGGATCCGTGTCCTGTCTTTTAAAACTGGCATCATTTCCCTGTGTAAAGCACATTTG
GAAGACAAGTACAGATACCTTTTCAAGCAAGTGGCAAGTTCAACAGGATTTTGTGACCAGCGCAGGCTGGGCCTC
CTTCTGCATGATTCTATCCAAATTCCAAGACAGTTGGGTGAAGTTGCATCCTTTGGGGGCAGTAACATTGAGCCA
AGTGTCCGGAGCTGCTTCCAATTTGCTAATAATAAGCCAGAGATCGAAGCGGCCCTCTTCCTAGACTGGATGAGA
CTGGAACCCCAGTCCATGGTGTGGCTGCCCGTCCTGCACAGAGTGGCTGCTGCAGAAACTGCCAAGCATCAGGCC
AAATGTAACATCTGCAAAGAGTGTCCAATCATTGGATTCAGGTACAGGAGTCTAAAGCACTTTAATTATGACATC
TGCCAAAGCTGCTTTTTTTCTGGTCGAGTTGCAAAAGGCCATAAAATGCACTATCCCATGGTGGAATATTGCACT
CCGACTACATCAGGAGAAGATGTTCGAGACTTTGCCAAGGTACTAAAAAACAAATTTCGAACCAAAAGGTATTTT
GCGAAGCATCCCCGAATGGGCTACCTGCCAGTGCAGACTGTCTTAGAGGGGGACAACATGGAAACTCCCGTTACT
CTGATCAACTTCTGGCCAGTAGATTCTGCGCCTGCCTCGTCCCCTCAGCTTTCACACGATGATACTCATTCACGC
ATTGAACATTATGCTAGCAGGCTAGCAGAAATGGAAAACAGCAATGGATCTTATCTAAATGATAGCATCTCTCCT
AATGAGAGCATAGATGATGAACATTTGTTAATCCAGCATTACTGCCAAAGTTTGAACCAGGACTCCCCCCTGAGC
CAGCCTCGTAGTCCTGCCCAGATCTTGATTTCCTTAGAGAGTGAGGAAAGAGGGGAGCTAGAGAGAATCCTAGCA
GATCTTGAGGAAGAAAACAGGAATCTGCAAGCAGAATATGACCGTCTAAAGCAGCAGCACGAACATAAAGGCCTG
TCCCCACTGCCGTCCCCTCCTGAAATGATGCCCACCTCTCCCCAGAGTCCC

[0116] A nucleotide sequence encoding a micro-dystrophin protein optimized for skeletal muscle is further understood to include nucleotide sequences that are variants of any one of SEQ ID Nos. 22-39, 102-119, and 133-148. Variant nucleotide sequences include sequences that differ by one or more (e.g., 1, 2, 3, 4, 5, 6, 7, 8, 9, 10, 11, 12, 13, 14, 15, 16, 17, 18, 19, 20, or more) nucleotide substitutions, additions or deletions, such as allelic variants, and will, therefore, include coding sequences that differ from the nucleotide sequence of the coding sequence designated in any one of SEQ ID Nos. 22-39, 102-119, and 133-148.

[0117] In some embodiments, a micro-dystrophin protein optimized for skeletal muscle is encoded by a nucleic acid comprising a nucleotide sequence that is at least at least 70%, at least 75%, at least 80%, at least 85%, at least 90%, at least 91%, at least 92%, at least 93%, at least 94%, at least 95%, at least 96%, at least 97%, at least 98%, at least 99%, or 100% identical to the nucleotide sequence of any one of SEQ ID Nos. 22-39, 102-119, and 133-148.

[0118] In some embodiments, a micro-dystrophin protein optimized for skeletal muscle is encoded by a nucleic acid consisting essentially of a nucleotide sequence that is at least 70%, at least 75%, at least 80%, at least 85%, at least 90%, at least 91%, at least 92%, at least 93%, at least 94%, at least 95%, at least 96%, at least 97%, at least 98%, at least 99%, or 100% identical to the nucleotide sequence of any one of SEQ ID Nos. 22-39, 102-119, and 133-148.

[0119] In some embodiments, a micro-dystrophin protein optimized for skeletal muscle is encoded by a nucleic acid consisting of a nucleotide sequence that is at least 70%, at least 75%, at least 80%, at least 85%, at least 90%, at least 91%, at least 92%, at least 93%, at least 94%, at least 95%, at least 96%, at least 97%, at least 98%, at least 99%, or 100% identical to the nucleotide sequence of any one of SEQ ID Nos. 22-39, 102-119, and 133-148.

[0120] In some embodiments, it is desirable to overexpress micro-dystrophin proteins in skeletal muscle. Thus, in some embodiments, a nucleotide sequence encoding a micro-dystrophin protein optimized for skeletal muscle may be codon optimized for higher expression. In some embodiments, one or more codons (e.g., 1, 2, 3, 4, 5, 6, 7, 8, 9, 10, 11, 12, 13, 14, 15, 16, 17, 18, 19, 20, or more) are substituted.

[0121] In some embodiments, a micro-dystrophin protein as described herein further comprises one or more utrophin protein domains.

[0122] Non-limiting examples of amino acid sequences of micro-dystrophins for use in both heart and skeletal muscle are provided below. These constructs include the known syntrophin binding sites in dystrophin within repeat 17, repeat 22, and within the C-terminus prior to the coiled coil region.

Nterm-R2_R17_H3_R22_H4-trCterm + SynBS
(SEQ ID NO: 156)
MLWWEEVEDCYEREDVQKKTFTKWVNAQFSKFGKQHIENLFSDLQ
DGRRLLDLLEGLTGQKLPKEKGSTRVHALNNVNKALRVLQNNNVD
LVNIGSTDIVDGNHKLTLGLIWNIILHWQVKNVMKNIMAGLQQTN
SEKILLSWVRQSTRNYPQVNVINFTTSWSDGLALNALIHSHRPDL
FDWNSVVCQQSATQRLEHAFNIARYQLGIEKLLDPEDVDTTYPDK
KSILMYITSLFQVLPQQVSIEAIQEVEMLPRPPKVTKEEHFQLHH
QMHYSQQITVSLAQGYERTSSPKPRFKSYAYTQAAYVTTSDPTRS
PFPSQHLEAPEDKSFGSSLMESEVNLDRYQTALEEVLSWLLSAED
TLQAQGEISNDVEVVKDQFHTHEGYMMDLTAHQGRVGNILQLGSK
LIGTGKLSEDEETEVQEQMNLLNSRWECLRVASMEKQSNLHRVLM
DLQNQKLKELNDWLTKTEERTRKMEEEPLGPDLEDLKRQVQQHKV
LQEDLEQEQVRVNSLTHMVVVVDESSGDHATAALEEQLKVLGDRW
ANICRWTEDRWVLLQDREDRSVEKWRRFHYDIKIFNQWLTEAEQF
LRKTQIPENWEHAKYKWYLKELQDGIGQRQTVVRTLNATGEEIIQ
QSSKTDASILQEKLGSLNLRWQEVCKQLSDRKKRLEEQKQPDLAP
GLTTIGASPTQTVTLVTQPVVTKETAISKLEMPSSLMLEVPEETH
RLLQQFPLDLEKFLAWLTEAETTANVLQDATRKERLLEDSKGVKE
LMKQWQDLQGEIEAHTDVYHNLDENSQKILRSLEGSDDAVLLQRR
LDNMNEKWSELRKKSLNIRSHLEASSDQWKRLGPASQHELSTSVQ
GPWERAISPNKVPYYINHETQTTCWDHPKMTELYQSLADLNNVRF
SAYRTAMKLRRLQKALCLDLLSLSAACDALDQHNLKQNDQPMDIL
QIINCLTTIYDRLEQEHNNLVNVPLCVDMCLNWLLNVYDTGRIGR
IRVLSFKTGIISLCKAHLEDKYRYLFKQVASSTGFCDQRRLGLLL
HDSIQIPRQLGEVASFGGSNIEPSVRSCFQFANNKPEIEAALFLD
WMRLEPQSMVWLPVLHRVAAAETAKHQAKCNICKECPIIGFRYRS
LKHFNYDICQSCFFSGRVAKGHKMHYPMVEYCTPTTSGEDVRDFA
KVLKNKFRTKRYFAKHPRMGYLPVQTVLEGDNMETPVTLINFWPV
DSAPASSPQLSHDDTHSRIEHYASRLAEMENSNGSYLNDSISPNE
SIDDEHLLIQHYCQSLNQDSPLSQPRS
Nterm-R1_R17_H3_R21-R22_H4-trCterm + SynBS
(SEQ ID NO: 157)
MLWWEEVEDCYEREDVQKKTFTKWVNAQFSKFGKQHIENLFSDLQ
DGRRLLDLLEGLTGQKLPKEKGSTRVHALNNVNKALRVLQNNNVD
LVNIGSTDIVDGNHKLTLGLIWNIILHWQVKNVMKNIMAGLQQTN
SEKILLSWVRQSTRNYPQVNVINFTTSWSDGLALNALIHSHRPDL
FDWNSVVCQQSATQRLEHAFNIARYQLGIEKLLDPEDVDTTYPDK
KSILMYITSLFQVLPQQVSIEAIQEVEMLPRPPKVTKEEHFQLHH
QMHYSQQITVSLAQGYERTSSPKPRFKSYAYTQAAYVTTSDPTRS
PFPSQHLEAPEDKSFGSSLMESEVNLDRYQTALEEVLSWLLSAED
TLQAQGEISNDVEVVKDQFHTHEGYMMDLTAHQGRVGNILQLGSK
LIGTGKLSEDEETEVQEQMNLLNSRWECLRVASMEKQSNLHRVLM
DRFDRSVEKWRRFHYDIKIFNQWLTEAEQFLRKTQIPENWEHAKY
KWYLKELQDGIGQRQTVVRTLNATGEEIIQQSSKTDASILQEKLG
SLNLRWQEVCKQLSDRKKRLEEQKQPDLAPGLTTIGASPTQTVTL
VTQPVVTKETAISKLEMPSSLMLEVPKDSTQWLEAKEEAEQVLGQ
ARAKLESWKEGPYTVDAIQKKITETKQLAKDLRQWQTNVDVANDL
ALKLLRDYSADDTRKVHMITENINASWRSIHKRVSEREAALEETH
RLLQQFPLDLEKFLAWLTEAETTANVLQDATRKERLLEDSKGVKE
LMKQWQDLQGEIEAHTDVYHNLDENSQKILRSLEGSDDAVLLQRR
LDNMNFKWSELRKKSLNIRSHLEASSDQWKRLGPASQHELSTSVQ
GPWERAISPNKVPYYINHETQTTCWDHPKMTELYQSLADLNNVRE
SAYRTAMKLRRLQKALCLDLLSLSAACDALDQHNLKQNDQPMDIL
QIINCLTTIYDRLEQEHNNLVNVPLCVDMCLNWLLNVYDTGRIGR
IRVLSFKTGIISLCKAHLEDKYRYLFKQVASSTGFCDQRRLGLLL
HDSIQIPRQLGEVASFGGSNIEPSVRSCFQFANNKPEIEAALFLD
WMRLEPQSMVWLPVLHRVAAAETAKHQAKCNICKECPIIGFRYRS
LKHFNYDICQSCFFSGRVAKGHKMHYPMVEYCTPTTSGEDVRDFA
KVLKNKFRTKRYFAKHPRMGYLPVQTVLEGDNMETPVTLINFWPV
DSAPASSPQLSHDDTHSRIEHYASRLAEMENSNGSYLNDSISPNE
SIDDEHLLIQHYCQSLNQDSPLSQPRS
Nterm-R2_R17_H3_R22_H4-trCterm +
SynBS + coiled coil
(SEQ ID NO: 158)
MLWWEEVEDCYEREDVQKKTFTKWVNAQFSKFGKQHIENLFSDLQ
DGRRLLDLLEGLTGQKLPKEKGSTRVHALNNVNKALRVLQNNNVD
LVNIGSTDIVDGNHKLTLGLIWNIILHWQVKNVMKNIMAGLQQTN
SEKILLSWVRQSTRNYPQVNVINFTTSWSDGLALNALIHSHRPDL
FDWNSVVCQQSATQRLEHAFNIARYQLGIEKLLDPEDVDTTYPDK
KSILMYITSLFQVLPQQVSIEAIQEVEMLPRPPKVTKEEHFQLHH
QMHYSQQITVSLAQGYERTSSPKPRFKSYAYTQAAYVTTSDPTRS
PFPSQHLEAPEDKSFGSSLMESEVNLDRYQTALEEVLSWLLSAED
TLQAQGEISNDVEVVKDQFHTHEGYMMDLTAHQGRVGNILQLGSK
LIGTGKLSEDEETEVQEQMNLLNSRWECLRVASMEKQSNLHRVLM
DLQNQKLKELNDWLTKTEERTRKMEEEPLGPDLEDLKRQVQQHKV
LQEDLEQEQVRVNSLTHMVVVVDESSGDHATAALEEQLKVLGDRW
ANICRWTEDRWVLLQDREDRSVEKWRRFHYDIKIFNQWLTEAEQF
LRKTQIPENWEHAKYKWYLKELQDGIGQRQTVVRILNATGEEIIQ
QSSKTDASILQEKLGSLNLRWQEVCKQLSDRKKRLEEQKQPDLAP
GLTTIGASPTQTVTLVTQPVVTKETAISKLEMPSSLMLEVPEETH
RLLQQFPLDLEKFLAWLTEAETTANVLQDATRKERLLEDSKGVKE
LMKQWQDLQGEIEAHTDVYHNLDENSQKILRSLEGSDDAVLLQRR
LDNMNFKWSELRKKSLNIRSHLEASSDQWKRLGPASQHELSTSVQ
GPWERAISPNKVPYYINHETQTTCWDHPKMTELYQSLADLNNVRF
SAYRTAMKLRRLQKALCLDLLSLSAACDALDQHNLKQNDQPMDIL
QIINCLTTIYDRLEQEHNNLVNVPLCVDMCLNWLLNVYDTGRIGR
IRVLSFKTGIISLCKAHLEDKYRYLFKQVASSTGFCDQRRLGLLL
HDSIQIPRQLGEVASFGGSNIEPSVRSCFQFANNKPEIEAALFLD
WMRLEPQSMVWLPVLHRVAAAETAKHQAKCNICKECPIIGFRYRS
LKHFNYDICQSCFFSGRVAKGHKMHYPMVEYCTPTTSGEDVRDFA
KVLKNKFRTKRYFAKHPRMGYLPVQTVLEGDNMETPVTLINFWPV
DSAPASSPQLSHDDTHSRIEHYASRLAEMENSNGSYLNDSISPNE
SIDDEHLLIQHYCQSLNQDSPLSQPRSPAQILISLESEERGELER
ILADLEEENRNLQAEYDRLKQQHEHKGLSPLPSPPEMMPTSPQSP
Nterm-R1_R17_H3_R21-R22_H4-trCterm +
SynBS + coiled coil
(SEQ ID NO: 159)
MLWWEEVEDCYEREDVQKKTFTKWVNAQFSKFGKQHIENLFSDLQ
DGRRLLDLLEGLTGQKLPKEKGSTRVHALNNVNKALRVLQNNNVD
LVNIGSTDIVDGNHKLTLGLIWNIILHWQVKNVMKNIMAGLQQTN
SEKILLSWVRQSTRNYPQVNVINFTTSWSDGLALNALIHSHRPDL
FDWNSVVCQQSATQRLEHAFNIARYQLGIEKLLDPEDVDTTYPDK
KSILMYITSLFQVLPQQVSIEAIQEVEMLPRPPKVTKEEHFQLHH
QMHYSQQITVSLAQGYERTSSPKPRFKSYAYTQAAYVTTSDPTRS
PFPSQHLEAPEDKSFGSSLMESEVNLDRYQTALEEVLSWLLSAED
TLQAQGEISNDVEVVKDQFHTHEGYMMDLTAHQGRVGNILQLGSK
LIGTGKLSEDEETEVQEQMNLLNSRWECLRVASMEKQSNLHRVLM
DRFDRSVEKWRRFHYDIKIFNQWLTEAEQFLRKTQIPENWEHAKY
KWYLKELQDGIGQRQTVVRTLNATGEEIIQQSSKTDASILQEKLG
SLNLRWQEVCKQLSDRKKRLEEQKQPDLAPGLTTIGASPTQTVTL
VTQPVVTKETAISKLEMPSSLMLEVPKDSTQWLEAKEEAEQVLGQ
ARAKLESWKEGPYTVDAIQKKITETKQLAKDLRQWQTNVDVANDL
ALKLLRDYSADDTRKVHMITENINASWRSIHKRVSEREAALEETH
RLLQQFPLDLEKFLAWLTEAETTANVLQDATRKERLLEDSKGVKE
LMKQWQDLQGEIEAHTDVYHNLDENSQKILRSLEGSDDAVLLQRR
LDNMNFKWSELRKKSLNIRSHLEASSDQWKRLGPASQHELSTSVQ
GPWERAISPNKVPYYINHETQTTCWDHPKMTELYQSLADLNNVRF
SAYRTAMKLRRLQKALCLDLLSLSAACDALDQHNLKQNDQPMDIL
QIINCLTTIYDRLEQEHNNLVNVPLCVDMCLNWLLNVYDTGRIGR
IRVLSFKTGIISLCKAHLEDKYRYLFKQVASSTGFCDQRRLGLLL
HDSIQIPRQLGEVASFGGSNIEPSVRSCFQFANNKPEIEAALFLD
WMRLEPQSMVWLPVLHRVAAAETAKHQAKCNICKECPIIGFRYRS
LKHFNYDICQSCFFSGRVAKGHKMHYPMVEYCTPTTSGEDVRDFA
KVLKNKFRTKRYFAKHPRMGYLPVQTVLEGDNMETPVTLINFWPV
DSAPASSPQLSHDDTHSRIEHYASRLAEMENSNGSYLNDSISPNE
SIDDEHLLIQHYCQSLNQDSPLSQPRSPAQILISLESEERGELER
ILADLEEENRNLQAEYDRLKQQHEHKGLSPLPSPPEMMPTSPQSP
Nterm-R2_R17_R21-R22_H4-trCterm + SynBS
(SEQ ID NO: 160)
MLWWEEVEDCYEREDVQKKTFTKWVNAQFSKFGKQHIENLFSDLQ
DGRRLLDLLEGLTGQKLPKEKGSTRVHALNNVNKALRVLQNNNVD
LVNIGSTDIVDGNHKLTLGLIWNIILHWQVKNVMKNIMAGLQQTN
SEKILLSWVRQSTRNYPQVNVINFTTSWSDGLALNALIHSHRPDL
FDWNSVVCQQSATQRLEHAFNIARYQLGIEKLLDPEDVDTTYPDK
KSILMYITSLFQVLPQQVSIEAIQEVEMLPRPPKVTKEEHFQLHH
QMHYSQQITVSLAQGYERTSSPKPRFKSYAYTQAAYVTTSDPTRS
PFPSQHLEAPEDKSFGSSLMESEVNLDRYQTALEEVLSWLLSAED
TLQAQGEISNDVEVVKDQFHTHEGYMMDLTAHQGRVGNILQLGSK
LIGTGKLSEDEETEVQEQMNLLNSRWECLRVASMEKQSNLHRVLM
DLQNQKLKELNDWLTKTEERTRKMEEEPLGPDLEDLKRQVQQHKV
LQEDLEQEQVRVNSLTHMVVVVDESSGDHATAALEEQLKVLGDRW
ANICRWTEDRWVLLQDRFDRSVEKWRRFHYDIKIFNQWLTEAEQF
LRKTQIPENWEHAKYKWYLKELQDGIGQRQTVVRTLNATGEEIIQ
QSSKTDASILQEKLGSLNLRWQEVCKQLSDRKKRLEEQKKDSTQW
LEAKEEAEQVLGQARAKLESWKEGPYTVDAIQKKITETKQLAKDL
RQWQTNVDVANDLALKLLRDYSADDTRKVHMITENINASWRSIHK
RVSEREAALEETHRLLQQFPLDLEKFLAWLTEAETTANVLQDATR
KERLLEDSKGVKELMKQWQDLQGEIEAHTDVYHNLDENSQKILRS
LEGSDDAVLLQRRLDNMNFKWSELRKKSLNIRSHLEASSDQWKRL
GPASQHELSTSVQGPWERAISPNKVPYYINHETQTTCWDHPKMTE
LYQSLADLNNVRESAYRTAMKLRRLQKALCLDLLSLSAACDALDQ
HNLKQNDQPMDILQIINCLTTIYDRLEQEHNNLVNVPLCVDMCLN
WLLNVYDTGRTGRIRVLSFKTGIISLCKAHLEDKYRYLFKQVASS
TGFCDQRRLGLLLHDSIQIPRQLGEVASEGGSNIEPSVRSCFQFA
NNKPEIEAALFLDWMRLEPQSMVWLPVLHRVAAAETAKHQAKCNI
CKECPIIGFRYRSLKHFNYDICQSCFFSGRVAKGHKMHYPMVEYC
TPTTSGEDVRDFAKVLKNKFRTKRYFAKHPRMGYLPVQTVLEGDN
METPVTLINFWPVDSAPASSPQLSHDDTHSRIEHYASRLAEMENS
NGSYLNDSISPNESIDDEHLLIQHYCQSLNQDSPLSQPRS

[0123] Non-limiting examples of nucleotide sequences encoding micro-dystrophins for use in both heart and skeletal muscle are provided below.

Nterm-R2_R17_H3_R22_H4-trCterm + SynBS
Human sequence without codon alterations:
(SEQ ID NO: 166)
ATGCTTTGGTGGGAAGAAGTAGAGGACTGTTATGAAAGAGAAGAT
GTTCAAAAGAAAACATTCACAAAATGGGTAAATGCACAATTTTCT
AAGTTTGGGAAGCAGCATATTGAGAACCTCTTCAGTGACCTACAG
GATGGGAGGCGCCTCCTAGACCTCCTCGAAGGCCTGACAGGGCAA
AAACTGCCAAAAGAAAAAGGATCCACAAGAGTTCATGCCCTGAAC
AATGTCAACAAGGCACTGCGGGTTTTGCAGAACAATAATGTTGAT
TTAGTGAATATTGGAAGTACTGACATCGTAGATGGAAATCATAAA
CTGACTCTTGGTTTGATTTGGAATATAATCCTCCACTGGCAGGTC
AAAAATGTAATGAAAAATATCATGGCTGGATTGCAACAAACCAAC
AGTGAAAAGATTCTCCTGAGCTGGGTCCGACAATCAACTCGTAAT
TATCCACAGGTTAATGTAATCAACTTCACCACCAGCTGGTCTGAT
GGCCTGGCTTTGAATGCTCTCATCCATAGTCATAGGCCAGACCTA
TTTGACTGGAATAGTGTGGTTTGCCAGCAGTCAGCCACACAACGA
CTGGAACATGCATTCAACATCGCCAGATATCAATTAGGCATAGAG
AAACTACTCGATCCTGAAGATGTTGATACCACCTATCCAGATAAG
AAGTCCATCTTAATGTACATCACATCACTCTTCCAAGTTTTGCCT
CAACAAGTGAGCATTGAAGCCATCCAGGAAGTGGAAATGTTGCCA
AGGCCACCTAAAGTGACTAAAGAAGAACATTTTCAGTTACATCAT
CAAATGCACTATTCTCAACAGATCACGGTCAGTCTAGCACAGGGA
TATGAGAGAACTTCTTCCCCTAAGCCTCGATTCAAGAGCTATGCC
TACACACAGGCTGCTTATGTCACCACCTCTGACCCTACACGGAGC
CCATTTCCTTCACAGCATTTGGAAGCTCCTGAAGACAAGTCATTT
GGCAGTTCATTGATGGAGAGTGAAGTAAACCTGGACCGTTATCAA
ACAGCTTTAGAAGAAGTATTATCGTGGCTTCTTTCTGCTGAGGAC
ACATTGCAAGCACAAGGAGAGATTTCTAATGATGTGGAAGTGGTG
AAAGACCAGTTTCATACTCATGAGGGGTACATGATGGATTTGACA
GCCCATCAGGGCCGGGTTGGTAATATTCTACAATTGGGAAGTAAG
CTGATTGGAACAGGAAAATTATCAGAAGATGAAGAAACTGAAGTA
CAAGAGCAGATGAATCTCCTAAATTCAAGATGGGAATGCCTCAGG
GTAGCTAGCATGGAAAAACAAAGCAATTTACATAGAGTTTTAATG
GATCTCCAGAATCAGAAACTGAAAGAGTTGAATGACTGGCTAACA
AAAACAGAAGAAAGAACAAGGAAAATGGAGGAAGAGCCTCTTGGA
CCTGATCTTGAAGACCTAAAACGCCAAGTACAACAACATAAGGTG
CTTCAAGAAGATCTAGAACAAGAACAAGTCAGGGTCAATTCTCTC
ACTCACATGGTGGTGGTAGTTGATGAATCTAGTGGAGATCACGCA
ACTGCTGCTTTGGAAGAACAACTTAAGGTATTGGGAGATCGATGG
GCAAACATCTGTAGATGGACAGAAGACCGCTGGGTTCTTTTACAA
GACCGATTTGACAGATCTGTTGAGAAATGGCGGCGTTTTCATTAT
GATATAAAGATATTTAATCAGTGGCTAACAGAAGCTGAACAGTTT
CTCAGAAAGACACAAATTCCTGAGAATTGGGAACATGCTAAATAC
AAATGGTATCTTAAGGAACTCCAGGATGGCATTGGGCAGCGGCAA
ACTGTTGTCAGAACATTGAATGCAACTGGGGAAGAAATAATTCAG
CAATCCTCAAAAACAGATGCCAGTATTCTACAGGAAAAATTGGGA
AGCCTGAATCTGCGGTGGCAGGAGGTCTGCAAACAGCTGTCAGAC
AGAAAAAAGAGGCTAGAAGAACAAAAGCAGCCTGACCTAGCTCCT
GGACTGACCACTATTGGAGCCTCTCCTACTCAGACTGTTACTCTG
GTGACACAACCTGTGGTTACTAAGGAAACTGCCATCTCCAAACTA
GAAATGCCATCTTCCTTGATGTTGGAGGTACCTGAAGAAACTCAT
AGATTACTGCAACAGTTCCCCCTGGACCTGGAAAAGTTTCTTGCC
TGGCTTACAGAAGCTGAAACAACTGCCAATGTCCTACAGGATGCT
ACCCGTAAGGAAAGGCTCCTAGAAGACTCCAAGGGAGTAAAAGAG
CTGATGAAACAATGGCAAGACCTCCAAGGTGAAATTGAAGCTCAC
ACAGATGTTTATCACAACCTGGATGAAAACAGCCAAAAAATCCTG
AGATCCCTGGAAGGTTCCGATGATGCAGTCCTGTTACAAAGACGT
TTGGATAACATGAACTTCAAGTGGAGTGAACTTCGGAAAAAGTCT
CTCAACATTAGGTCCCATTTGGAAGCCAGTTCTGACCAGTGGAAG
CGTCTGGGTCCAGCATCTCAGCACTTTCTTTCCACGTCTGTCCAG
GGTCCCTGGGAGAGAGCCATCTCGCCAAACAAAGTGCCCTACTAT
ATCAACCACGAGACTCAAACAACTTGCTGGGACCATCCCAAAATG
ACAGAGCTCTACCAGTCTTTAGCTGACCTGAATAATGTCAGATTC
TCAGCTTATAGGACTGCCATGAAACTCCGAAGACTGCAGAAGGCC
CTTTGCTTGGATCTCTTGAGCCTGTCAGCTGCATGTGATGCCTTG
GACCAGCACAACCTCAAGCAAAATGACCAGCCCATGGATATCCTG
CAGATTATTAATTGTTTGACCACTATTTATGACCGCCTGGAGCAA
GAGCACAACAATTTGGTCAACGTCCCTCTCTGCGTGGATATGTGT
CTGAACTGGCTGCTGAATGTTTATGATACGGGACGAACAGGGAGG
ATCCGTGTCCTGTCTTTTAAAACTGGCATCATTTCCCTGTGTAAA
GCACATTTGGAAGACAAGTACAGATACCTTTTCAAGCAAGTGGCA
AGTTCAACAGGATTTTGTGACCAGCGCAGGCTGGGCCTCCTTCTG
CATGATTCTATCCAAATTCCAAGACAGTTGGGTGAAGTTGCATCC
TTTGGGGGCAGTAACATTGAGCCAAGTGTCCGGAGCTGCTTCCAA
TTTGCTAATAATAAGCCAGAGATCGAAGCGGCCCTCTTCCTAGAC
TGGATGAGACTGGAACCCCAGTCCATGGTGTGGCTGCCCGTCCTG
CACAGAGTGGCTGCTGCAGAAACTGCCAAGCATCAGGCCAAATGT
AACATCTGCAAAGAGTGTCCAATCATTGGATTCAGGTACAGGAGT
CTAAAGCACTTTAATTATGACATCTGCCAAAGCTGCTTTTTTTCT
GGTCGAGTTGCAAAAGGCCATAAAATGCACTATCCCATGGTGGAA
TATTGCACTCCGACTACATCAGGAGAAGATGTTCGAGACTTTGCC
AAGGTACTAAAAAACAAATTTCGAACCAAAAGGTATTTTGCGAAG
CATCCCCGAATGGGCTACCTGCCAGTGCAGACTGTCTTAGAGGGG
GACAACATGGAAACTCCCGTTACTCTGATCAACTTCTGGCCAGTA
GATTCTGCGCCTGCCTCGTCCCCTCAGCTTTCACACGATGATACT
CATTCACGCATTGAACATTATGCTAGCAGGCTAGCAGAAATGGAA
AACAGCAATGGATCTTATCTAAATGATAGCATCTCTCCTAATGAG
AGCATAGATGATGAACATTTGTTAATCCAGCATTACTGCCAAAGT
TTGAACCAGGACTCCCCCCTGAGCCAGCCTCGTAGT
Human sequence with codon optimization:
(SEQ ID NO: 167)
ATGCTGTGGTGGGAGGAGGTGGAGGACTGCTACGAGCGGGAGGAC
GTGCAGAAGAAGACCTTCACCAAGTGGGTGAACGCCCAGTTCAGC
AAGTTCGGCAAGCAGCACATCGAGAACCTGTTCAGCGACCTGCAG
GACGGCCGGCGGCTGCTGGACCTGCTGGAGGGCCTGACCGGCCAG
AAGCTGCCCAAGGAGAAGGGCAGCACCCGGGTGCACGCCCTGAAC
AACGTGAACAAGGCCCTGCGGGTGCTGCAGAACAACAACGTGGAC
CTGGTGAACATCGGCAGCACCGACATCGTGGACGGCAACCACAAG
CTGACCCTGGGCCTGATCTGGAACATCATCCTGCACTGGCAGGTG
AAGAACGTGATGAAGAACATCATGGCCGGCCTGCAGCAGACCAAC
AGCGAGAAGATCCTGCTGAGCTGGGTGCGGCAGAGCACCCGGAAC
TACCCCCAGGTGAACGTGATCAACTTCACCACCAGCTGGAGCGAC
GGCCTGGCCCTGAACGCCCTGATCCACAGCCACCGGCCCGACCTG
TTCGACTGGAACAGCGTGGTGTGCCAGCAGAGCGCCACCCAGCGG
CTGGAGCACGCCTTCAACATCGCCCGGTACCAGCTGGGCATCGAG
AAGCTGCTGGACCCCGAGGACGTGGACACCACCTACCCCGACAAG
AAGAGCATCCTGATGTACATCACCAGCCTGTTCCAGGTGCTGCCC
CAGCAGGTGAGCATCGAGGCCATCCAGGAGGTGGAGATGCTGCCC
CGGCCCCCCAAGGTGACCAAGGAGGAGCACTTCCAGCTGCACCAC
CAGATGCACTACAGCCAGCAGATCACCGTGAGCCTGGCCCAGGGC
TACGAGCGGACCAGCAGCCCCAAGCCCCGGTTCAAGAGCTACGCC
TACACCCAGGCCGCCTACGTGACCACCAGCGACCCCACCCGGAGC
CCCTTCCCCAGCCAGCACCTGGAGGCCCCCGAGGACAAGAGCTTC
GGCAGCAGCCTGATGGAGAGCGAGGTGAACCTGGACCGGTACCAG
ACCGCCCTGGAGGAGGTGCTGAGCTGGCTGCTGAGCGCCGAGGAC
ACCCTGCAGGCCCAGGGCGAGATCAGCAACGACGTGGAGGTGGTG
AAGGACCAGTTCCACACCCACGAGGGCTACATGATGGACCTGACC
GCCCACCAGGGCCGGGTGGGCAACATCCTGCAGCTGGGCAGCAAG
CTGATCGGCACCGGCAAGCTGAGCGAGGACGAGGAGACCGAGGTG
CAGGAGCAGATGAACCTGCTGAACAGCCGGTGGGAGTGCCTGCGG
GTGGCCAGCATGGAGAAGCAGAGCAACCTGCACCGGGTGCTGATG
GACCTGCAGAACCAGAAGCTGAAGGAGCTGAACGACTGGCTGACC
AAGACCGAGGAGCGGACCCGGAAGATGGAGGAGGAGCCCCTGGGC
CCCGACCTGGAGGACCTGAAGCGGCAGGTGCAGCAGCACAAGGTG
CTGCAGGAGGACCTGGAGCAGGAGCAGGTGCGGGTGAACAGCCTG
ACCCACATGGTGGTGGTGGTGGACGAGAGCAGCGGCGACCACGCC
ACCGCCGCCCTGGAGGAGCAGCTGAAGGTGCTGGGCGACCGGTGG
GCCAACATCTGCCGGTGGACCGAGGACCGGTGGGTGCTGCTGCAG
GACCGGTTCGACCGGAGCGTGGAGAAGTGGCGGCGGTTCCACTAC
GACATCAAGATCTTCAACCAGTGGCTGACCGAGGCCGAGCAGTTC
CTGCGGAAGACCCAGATCCCCGAGAACTGGGAGCACGCCAAGTAC
AAGTGGTACCTGAAGGAGCTGCAGGACGGCATCGGCCAGCGGCAG
ACCGTGGTGCGGACCCTGAACGCCACCGGCGAGGAGATCATCCAG
CAGAGCAGCAAGACCGACGCCAGCATCCTGCAGGAGAAGCTGGGC
AGCCTGAACCTGCGGTGGCAGGAGGTGTGCAAGCAGCTGAGCGAC
CGGAAGAAGCGGCTGGAGGAGCAGAAGCAGCCCGACCTGGCCCCC
GGCCTGACCACCATCGGCGCCAGCCCCACCCAGACCGTGACCCTG
GTGACCCAGCCCGTGGTGACCAAGGAGACCGCCATCAGCAAGCTG
GAGATGCCCAGCAGCCTGATGCTGGAGGTGCCCGAGGAGACCCAC
CGGCTGCTGCAGCAGTTCCCCCTGGACCTGGAGAAGTTCCTGGCC
TGGCTGACCGAGGCCGAGACCACCGCCAACGTGCTGCAGGACGCC
ACCCGGAAGGAGCGGCTGCTGGAGGACAGCAAGGGCGTGAAGGAG
CTGATGAAGCAGTGGCAGGACCTGCAGGGCGAGATCGAGGCCCAC
ACCGACGTGTACCACAACCTGGACGAGAACAGCCAGAAGATCCTG
CGGAGCCTGGAGGGCAGCGACGACGCCGTGCTGCTGCAGCGGCGG
CTGGACAACATGAACTTCAAGTGGAGCGAGCTGCGGAAGAAGAGC
CTGAACATCCGGAGCCACCTGGAGGCCAGCAGCGACCAGTGGAAG
CGGCTGGGCCCCGCCAGCCAGCACTTCCTGAGCACCAGCGTGCAG
GGCCCCTGGGAGCGGGCCATCAGCCCCAACAAGGTGCCCTACTAC
ATCAACCACGAGACCCAGACCACCTGCTGGGACCACCCCAAGATG
ACCGAGCTGTACCAGAGCCTGGCCGACCTGAACAACGTGCGGTTC
AGCGCCTACCGGACCGCCATGAAGCTGCGGCGGCTGCAGAAGGCC
CTGTGCCTGGACCTGCTGAGCCTGAGCGCCGCCTGCGACGCCCTG
GACCAGCACAACCTGAAGCAGAACGACCAGCCCATGGACATCCTG
CAGATCATCAACTGCCTGACCACCATCTACGACCGGCTGGAGCAG
GAGCACAACAACCTGGTGAACGTGCCCCTGTGCGTGGACATGTGC
CTGAACTGGCTGCTGAACGTGTACGACACCGGCCGGACCGGCCGG
ATCCGGGTGCTGAGCTTCAAGACCGGCATCATCAGCCTGTGCAAG
GCCCACCTGGAGGACAAGTACCGGTACCTGTTCAAGCAGGTGGCC
AGCAGCACCGGCTTCTGCGACCAGCGGCGGCTGGGCCTGCTGCTG
CACGACAGCATCCAGATCCCCCGGCAGCTGGGCGAGGTGGCCAGC
TTCGGCGGCAGCAACATCGAGCCCAGCGTGCGGAGCTGCTTCCAG
TTCGCCAACAACAAGCCCGAGATCGAGGCCGCCCTGTTCCTGGAC
TGGATGCGGCTGGAGCCCCAGAGCATGGTGTGGCTGCCCGTGCTG
CACCGGGTGGCCGCCGCCGAGACCGCCAAGCACCAGGCCAAGTGC
AACATCTGCAAGGAGTGCCCCATCATCGGCTTCCGGTACCGGAGC
CTGAAGCACTTCAACTACGACATCTGCCAGAGCTGCTTCTTCAGC
GGCCGGGTGGCCAAGGGCCACAAGATGCACTACCCCATGGTGGAG
TACTGCACCCCCACCACCAGCGGCGAGGACGTGCGGGACTTCGCC
AAGGTGCTGAAGAACAAGTTCCGGACCAAGCGGTACTTCGCCAAG
CACCCCCGGATGGGCTACCTGCCCGTGCAGACCGTGCTGGAGGGC
GACAACATGGAGACCCCCGTGACCCTGATCAACTTCTGGCCCGTG
GACAGCGCCCCCGCCAGCAGCCCCCAGCTGAGCCACGACGACACC
CACAGCCGGATCGAGCACTACGCCAGCCGGCTGGCCGAGATGGAG
AACAGCAACGGCAGCTACCTGAACGACAGCATCAGCCCCAACGAG
AGCATCGACGACGAGCACCTGCTGATCCAGCACTACTGCCAGAGC
CTGAACCAGGACAGCCCCCTGAGCCAGCCCCGGAGC
Nterm-R1_R17_H3_R21-R22_H4-trCterm + SynBS
Human sequence without codon alterations:
(SEQ ID NO: 168)
ATGCTTTGGTGGGAAGAAGTAGAGGACTGTTATGAAAGAGAAGAT
GTTCAAAAGAAAACATTCACAAAATGGGTAAATGCACAATTTTCT
AAGTTTGGGAAGCAGCATATTGAGAACCTCTTCAGTGACCTACAG
GATGGGAGGCGCCTCCTAGACCTCCTCGAAGGCCTGACAGGGCAA
AAACTGCCAAAAGAAAAAGGATCCACAAGAGTTCATGCCCTGAAC
AATGTCAACAAGGCACTGCGGGTTTTGCAGAACAATAATGTTGAT
TTAGTGAATATTGGAAGTACTGACATCGTAGATGGAAATCATAAA
CTGACTCTTGGTTTGATTTGGAATATAATCCTCCACTGGCAGGTC
AAAAATGTAATGAAAAATATCATGGCTGGATTGCAACAAACCAAC
AGTGAAAAGATTCTCCTGAGCTGGGTCCGACAATCAACTCGTAAT
TATCCACAGGTTAATGTAATCAACTTCACCACCAGCTGGTCTGAT
GGCCTGGCTTTGAATGCTCTCATCCATAGTCATAGGCCAGACCTA
TTTGACTGGAATAGTGTGGTTTGCCAGCAGTCAGCCACACAACGA
CTGGAACATGCATTCAACATCGCCAGATATCAATTAGGCATAGAG
AAACTACTCGATCCTGAAGATGTTGATACCACCTATCCAGATAAG
AAGTCCATCTTAATGTACATCACATCACTCTTCCAAGTTTTGCCT
CAACAAGTGAGCATTGAAGCCATCCAGGAAGTGGAAATGTTGCCA
AGGCCACCTAAAGTGACTAAAGAAGAACATTTTCAGTTACATCAT
CAAATGCACTATTCTCAACAGATCACGGTCAGTCTAGCACAGGGA
TATGAGAGAACTTCTTCCCCTAAGCCTCGATTCAAGAGCTATGCC
TACACACAGGCTGCTTATGTCACCACCTCTGACCCTACACGGAGC
CCATTTCCTTCACAGCATTTGGAAGCTCCTGAAGACAAGTCATTT
GGCAGTTCATTGATGGAGAGTGAAGTAAACCTGGACCGTTATCAA
ACAGCTTTAGAAGAAGTATTATCGTGGCTTCTTTCTGCTGAGGAC
ACATTGCAAGCACAAGGAGAGATTTCTAATGATGTGGAAGTGGTG
AAAGACCAGTTTCATACTCATGAGGGGTACATGATGGATTTGACA
GCCCATCAGGGCCGGGTTGGTAATATTCTACAATTGGGAAGTAAG
CTGATTGGAACAGGAAAATTATCAGAAGATGAAGAAACTGAAGTA
CAAGAGCAGATGAATCTCCTAAATTCAAGATGGGAATGCCTCAGG
GTAGCTAGCATGGAAAAACAAAGCAATTTACATAGAGTTTTAATG
GATCGATTTGACAGATCTGTTGAGAAATGGCGGCGTTTTCATTAT
GATATAAAGATATTTAATCAGTGGCTAACAGAAGCTGAACAGTTT
CTCAGAAAGACACAAATTCCTGAGAATTGGGAACATGCTAAATAC
AAATGGTATCTTAAGGAACTCCAGGATGGCATTGGGCAGCGGCAA
ACTGTTGTCAGAACATTGAATGCAACTGGGGAAGAAATAATTCAG
CAATCCTCAAAAACAGATGCCAGTATTCTACAGGAAAAATTGGGA
AGCCTGAATCTGCGGTGGCAGGAGGTCTGCAAACAGCTGTCAGAC
AGAAAAAAGAGGCTAGAAGAACAAAAGCAGCCTGACCTAGCTCCT
GGACTGACCACTATTGGAGCCTCTCCTACTCAGACTGTTACTCTG
GTGACACAACCTGTGGTTACTAAGGAAACTGCCATCTCCAAACTA
GAAATGCCATCTTCCTTGATGTTGGAGGTACCTAAGGATTCAACA
CAATGGCTGGAAGCTAAGGAAGAAGCTGAGCAGGTCTTAGGACAG
GCCAGAGCCAAGCTTGAGTCATGGAAGGAGGGTCCCTATACAGTA
GATGCAATCCAAAAGAAAATCACAGAAACCAAGCAGTTGGCCAAA
GACCTCCGCCAGTGGCAGACAAATGTAGATGTGGCAAATGACTTG
GCCCTGAAACTTCTCCGGGATTATTCTGCAGATGATACCAGAAAA
GTCCACATGATAACAGAGAATATCAATGCCTCTTGGAGAAGCATT
CATAAAAGGGTGAGTGAGCGAGAGGCTGCTTTGGAAGAAACTCAT
AGATTACTGCAACAGTTCCCCCTGGACCTGGAAAAGTTTCTTGCC
TGGCTTACAGAAGCTGAAACAACTGCCAATGTCCTACAGGATGCT
ACCCGTAAGGAAAGGCTCCTAGAAGACTCCAAGGGAGTAAAAGAG
CTGATGAAACAATGGCAAGACCTCCAAGGTGAAATTGAAGCTCAC
ACAGATGTTTATCACAACCTGGATGAAAACAGCCAAAAAATCCTG
AGATCCCTGGAAGGTTCCGATGATGCAGTCCTGTTACAAAGACGT
TTGGATAACATGAACTTCAAGTGGAGTGAACTTCGGAAAAAGTCT
CTCAACATTAGGTCCCATTTGGAAGCCAGTTCTGACCAGTGGAAG
CGTCTGGGTCCAGCATCTCAGCACTTTCTTTCCACGTCTGTCCAG
GGTCCCTGGGAGAGAGCCATCTCGCCAAACAAAGTGCCCTACTAT
ATCAACCACGAGACTCAAACAACTTGCTGGGACCATCCCAAAATG
ACAGAGCTCTACCAGTCTTTAGCTGACCTGAATAATGTCAGATTC
TCAGCTTATAGGACTGCCATGAAACTCCGAAGACTGCAGAAGGCC
CTTTGCTTGGATCTCTTGAGCCTGTCAGCTGCATGTGATGCCTTG
GACCAGCACAACCTCAAGCAAAATGACCAGCCCATGGATATCCTG
CAGATTATTAATTGTTTGACCACTATTTATGACCGCCTGGAGCAA
GAGCACAACAATTTGGTCAACGTCCCTCTCTGCGTGGATATGTGT
CTGAACTGGCTGCTGAATGTTTATGATACGGGACGAACAGGGAGG
ATCCGTGTCCTGTCTTTTAAAACTGGCATCATTTCCCTGTGTAAA
GCACATTTGGAAGACAAGTACAGATACCTTTTCAAGCAAGTGGCA
AGTTCAACAGGATTTTGTGACCAGCGCAGGCTGGGCCTCCTTCTG
CATGATTCTATCCAAATTCCAAGACAGTTGGGTGAAGTTGCATCC
TTTGGGGGCAGTAACATTGAGCCAAGTGTCCGGAGCTGCTTCCAA
TTTGCTAATAATAAGCCAGAGATCGAAGCGGCCCTCTTCCTAGAC
TGGATGAGACTGGAACCCCAGTCCATGGTGTGGCTGCCCGTCCTG
CACAGAGTGGCTGCTGCAGAAACTGCCAAGCATCAGGCCAAATGT
AACATCTGCAAAGAGTGTCCAATCATTGGATTCAGGTACAGGAGT
CTAAAGCACTTTAATTATGACATCTGCCAAAGCTGCTTTTTTTCT
GGTCGAGTTGCAAAAGGCCATAAAATGCACTATCCCATGGTGGAA
TATTGCACTCCGACTACATCAGGAGAAGATGTTCGAGACTTTGCC
AAGGTACTAAAAAACAAATTTCGAACCAAAAGGTATTTTGCGAAG
CATCCCCGAATGGGCTACCTGCCAGTGCAGACTGTCTTAGAGGGG
GACAACATGGAAACTCCCGTTACTCTGATCAACTTCTGGCCAGTA
GATTCTGCGCCTGCCTCGTCCCCTCAGCTTTCACACGATGATACT
CATTCACGCATTGAACATTATGCTAGCAGGCTAGCAGAAATGGAA
AACAGCAATGGATCTTATCTAAATGATAGCATCTCTCCTAATGAG
AGCATAGATGATGAACATTTGTTAATCCAGCATTACTGCCAAAGT
TTGAACCAGGACTCCCCCCTGAGCCAGCCTCGTAGT
Human sequence with codon optimization:
(SEQ ID NO: 169)
ATGCTGTGGTGGGAGGAGGTGGAGGACTGCTACGAGCGGGAGGAC
GTGCAGAAGAAGACCTTCACCAAGTGGGTGAACGCCCAGTTCAGC
AAGTTCGGCAAGCAGCACATCGAGAACCTGTTCAGCGACCTGCAG
GACGGCCGGCGGCTGCTGGACCTGCTGGAGGGCCTGACCGGCCAG
AAGCTGCCCAAGGAGAAGGGCAGCACCCGGGTGCACGCCCTGAAC
AACGTGAACAAGGCCCTGCGGGTGCTGCAGAACAACAACGTGGAC
CTGGTGAACATCGGCAGCACCGACATCGTGGACGGCAACCACAAG
CTGACCCTGGGCCTGATCTGGAACATCATCCTGCACTGGCAGGTG
AAGAACGTGATGAAGAACATCATGGCCGGCCTGCAGCAGACCAAC
AGCGAGAAGATCCTGCTGAGCTGGGTGCGGCAGAGCACCCGGAAC
TACCCCCAGGTGAACGTGATCAACTTCACCACCAGCTGGAGCGAC
GGCCTGGCCCTGAACGCCCTGATCCACAGCCACCGGCCCGACCTG
TTCGACTGGAACAGCGTGGTGTGCCAGCAGAGCGCCACCCAGCGG
CTGGAGCACGCCTTCAACATCGCCCGGTACCAGCTGGGCATCGAG
AAGCTGCTGGACCCCGAGGACGTGGACACCACCTACCCCGACAAG
AAGAGCATCCTGATGTACATCACCAGCCTGTTCCAGGTGCTGCCC
CAGCAGGTGAGCATCGAGGCCATCCAGGAGGTGGAGATGCTGCCC
CGGCCCCCCAAGGTGACCAAGGAGGAGCACTTCCAGCTGCACCAC
CAGATGCACTACAGCCAGCAGATCACCGTGAGCCTGGCCCAGGGC
TACGAGCGGACCAGCAGCCCCAAGCCCCGGTTCAAGAGCTACGCC
TACACCCAGGCCGCCTACGTGACCACCAGCGACCCCACCCGGAGC
CCCTTCCCCAGCCAGCACCTGGAGGCCCCCGAGGACAAGAGCTTC
GGCAGCAGCCTGATGGAGAGCGAGGTGAACCTGGACCGGTACCAG
ACCGCCCTGGAGGAGGTGCTGAGCTGGCTGCTGAGCGCCGAGGAC
ACCCTGCAGGCCCAGGGCGAGATCAGCAACGACGTGGAGGTGGTG
AAGGACCAGTTCCACACCCACGAGGGCTACATGATGGACCTGACC
GCCCACCAGGGCCGGGTGGGCAACATCCTGCAGCTGGGCAGCAAG
CTGATCGGCACCGGCAAGCTGAGCGAGGACGAGGAGACCGAGGTG
CAGGAGCAGATGAACCTGCTGAACAGCCGGTGGGAGTGCCTGCGG
GTGGCCAGCATGGAGAAGCAGAGCAACCTGCACCGGGTGCTGATG
GACCGGTTCGACCGGAGCGTGGAGAAGTGGCGGCGGTTCCACTAC
GACATCAAGATCTTCAACCAGTGGCTGACCGAGGCCGAGCAGTTC
CTGCGGAAGACCCAGATCCCCGAGAACTGGGAGCACGCCAAGTAC
AAGTGGTACCTGAAGGAGCTGCAGGACGGCATCGGCCAGCGGCAG
ACCGTGGTGCGGACCCTGAACGCCACCGGCGAGGAGATCATCCAG
CAGAGCAGCAAGACCGACGCCAGCATCCTGCAGGAGAAGCTGGGC
AGCCTGAACCTGCGGTGGCAGGAGGTGTGCAAGCAGCTGAGCGAC
CGGAAGAAGCGGCTGGAGGAGCAGAAGCAGCCCGACCTGGCCCCC
GGCCTGACCACCATCGGCGCCAGCCCCACCCAGACCGTGACCCTG
GTGACCCAGCCCGTGGTGACCAAGGAGACCGCCATCAGCAAGCTG
GAGATGCCCAGCAGCCTGATGCTGGAGGTGCCCAAGGACAGCACC
CAGTGGCTGGAGGCCAAGGAGGAGGCCGAGCAGGTGCTGGGCCAG
GCCCGGGCCAAGCTGGAGAGCTGGAAGGAGGGCCCCTACACCGTG
GACGCCATCCAGAAGAAGATCACCGAGACCAAGCAGCTGGCCAAG
GACCTGCGGCAGTGGCAGACCAACGTGGACGTGGCCAACGACCTG
GCCCTGAAGCTGCTGCGGGACTACAGCGCCGACGACACCCGGAAG
GTGCACATGATCACCGAGAACATCAACGCCAGCTGGCGGAGCATC
CACAAGCGGGTGAGCGAGCGGGAGGCCGCCCTGGAGGAGACCCAC
CGGCTGCTGCAGCAGTTCCCCCTGGACCTGGAGAAGTTCCTGGCC
TGGCTGACCGAGGCCGAGACCACCGCCAACGTGCTGCAGGACGCC
ACCCGGAAGGAGCGGCTGCTGGAGGACAGCAAGGGCGTGAAGGAG
CTGATGAAGCAGTGGCAGGACCTGCAGGGCGAGATCGAGGCCCAC
ACCGACGTGTACCACAACCTGGACGAGAACAGCCAGAAGATCCTG
CGGAGCCTGGAGGGCAGCGACGACGCCGTGCTGCTGCAGCGGCGG
CTGGACAACATGAACTTCAAGTGGAGCGAGCTGCGGAAGAAGAGC
CTGAACATCCGGAGCCACCTGGAGGCCAGCAGCGACCAGTGGAAG
CGGCTGGGCCCCGCCAGCCAGCACTTCCTGAGCACCAGCGTGCAG
GGCCCCTGGGAGCGGGCCATCAGCCCCAACAAGGTGCCCTACTAC
ATCAACCACGAGACCCAGACCACCTGCTGGGACCACCCCAAGATG
ACCGAGCTGTACCAGAGCCTGGCCGACCTGAACAACGTGCGGTTC
AGCGCCTACCGGACCGCCATGAAGCTGCGGCGGCTGCAGAAGGCC
CTGTGCCTGGACCTGCTGAGCCTGAGCGCCGCCTGCGACGCCCTG
GACCAGCACAACCTGAAGCAGAACGACCAGCCCATGGACATCCTG
CAGATCATCAACTGCCTGACCACCATCTACGACCGGCTGGAGCAG
GAGCACAACAACCTGGTGAACGTGCCCCTGTGCGTGGACATGTGC
CTGAACTGGCTGCTGAACGTGTACGACACCGGCCGGACCGGCCGG
ATCCGGGTGCTGAGCTTCAAGACCGGCATCATCAGCCTGTGCAAG
GCCCACCTGGAGGACAAGTACCGGTACCTGTTCAAGCAGGTGGCC
AGCAGCACCGGCTTCTGCGACCAGCGGCGGCTGGGCCTGCTGCTG
CACGACAGCATCCAGATCCCCCGGCAGCTGGGCGAGGTGGCCAGC
TTCGGCGGCAGCAACATCGAGCCCAGCGTGCGGAGCTGCTTCCAG
TTCGCCAACAACAAGCCCGAGATCGAGGCCGCCCTGTTCCTGGAC
TGGATGCGGCTGGAGCCCCAGAGCATGGTGTGGCTGCCCGTGCTG
CACCGGGTGGCCGCCGCCGAGACCGCCAAGCACCAGGCCAAGTGC
AACATCTGCAAGGAGTGCCCCATCATCGGCTTCCGGTACCGGAGC
CTGAAGCACTTCAACTACGACATCTGCCAGAGCTGCTTCTTCAGC
GGCCGGGTGGCCAAGGGCCACAAGATGCACTACCCCATGGTGGAG
TACTGCACCCCCACCACCAGCGGCGAGGACGTGCGGGACTTCGCC
AAGGTGCTGAAGAACAAGTTCCGGACCAAGCGGTACTTCGCCAAG
CACCCCCGGATGGGCTACCTGCCCGTGCAGACCGTGCTGGAGGGC
GACAACATGGAGACCCCCGTGACCCTGATCAACTTCTGGCCCGTG
GACAGCGCCCCCGCCAGCAGCCCCCAGCTGAGCCACGACGACACC
CACAGCCGGATCGAGCACTACGCCAGCCGGCTGGCCGAGATGGAG
AACAGCAACGGCAGCTACCTGAACGACAGCATCAGCCCCAACGAG
AGCATCGACGACGAGCACCTGCTGATCCAGCACTACTGCCAGAGC
CTGAACCAGGACAGCCCCCTGAGCCAGCCCCGGAGC
Nterm-R2_R17_H3_R22_H4-
trCterm + SynBS + coiled coil
Human sequence without codon alterations:
(SEQ ID NO: 170)
ATGCTTTGGTGGGAAGAAGTAGAGGACTGTTATGAAAGAGAAGAT
GTTCAAAAGAAAACATTCACAAAATGGGTAAATGCACAATTTTCT
AAGTTTGGGAAGCAGCATATTGAGAACCTCTTCAGTGACCTACAG
GATGGGAGGCGCCTCCTAGACCTCCTCGAAGGCCTGACAGGGCAA
AAACTGCCAAAAGAAAAAGGATCCACAAGAGTTCATGCCCTGAAC
AATGTCAACAAGGCACTGCGGGTTTTGCAGAACAATAATGTTGAT
TTAGTGAATATTGGAAGTACTGACATCGTAGATGGAAATCATAAA
CTGACTCTTGGTTTGATTTGGAATATAATCCTCCACTGGCAGGTC
AAAAATGTAATGAAAAATATCATGGCTGGATTGCAACAAACCAAC
AGTGAAAAGATTCTCCTGAGCTGGGTCCGACAATCAACTCGTAAT
TATCCACAGGTTAATGTAATCAACTTCACCACCAGCTGGTCTGAT
GGCCTGGCTTTGAATGCTCTCATCCATAGTCATAGGCCAGACCTA
TTTGACTGGAATAGTGTGGTTTGCCAGCAGTCAGCCACACAACGA
CTGGAACATGCATTCAACATCGCCAGATATCAATTAGGCATAGAG
AAACTACTCGATCCTGAAGATGTTGATACCACCTATCCAGATAAG
AAGTCCATCTTAATGTACATCACATCACTCTTCCAAGTTTTGCCT
CAACAAGTGAGCATTGAAGCCATCCAGGAAGTGGAAATGTTGCCA
AGGCCACCTAAAGTGACTAAAGAAGAACATTTTCAGTTACATCAT
CAAATGCACTATTCTCAACAGATCACGGTCAGTCTAGCACAGGGA
TATGAGAGAACTTCTTCCCCTAAGCCTCGATTCAAGAGCTATGCC
TACACACAGGCTGCTTATGTCACCACCTCTGACCCTACACGGAGC
CCATTTCCTTCACAGCATTTGGAAGCTCCTGAAGACAAGTCATTT
GGCAGTTCATTGATGGAGAGTGAAGTAAACCTGGACCGTTATCAA
ACAGCTTTAGAAGAAGTATTATCGTGGCTTCTTTCTGCTGAGGAC
ACATTGCAAGCACAAGGAGAGATTTCTAATGATGTGGAAGTGGTG
AAAGACCAGTTTCATACTCATGAGGGGTACATGATGGATTTGACA
GCCCATCAGGGCCGGGTTGGTAATATTCTACAATTGGGAAGTAAG
CTGATTGGAACAGGAAAATTATCAGAAGATGAAGAAACTGAAGTA
CAAGAGCAGATGAATCTCCTAAATTCAAGATGGGAATGCCTCAGG
GTAGCTAGCATGGAAAAACAAAGCAATTTACATAGAGTTTTAATG
GATCTCCAGAATCAGAAACTGAAAGAGTTGAATGACTGGCTAACA
AAAACAGAAGAAAGAACAAGGAAAATGGAGGAAGAGCCTCTTGGA
CCTGATCTTGAAGACCTAAAACGCCAAGTACAACAACATAAGGTG
CTTCAAGAAGATCTAGAACAAGAACAAGTCAGGGTCAATTCTCTC
ACTCACATGGTGGTGGTAGTTGATGAATCTAGTGGAGATCACGCA
ACTGCTGCTTTGGAAGAACAACTTAAGGTATTGGGAGATCGATGG
GCAAACATCTGTAGATGGACAGAAGACCGCTGGGTTCTTTTACAA
GACCGATTTGACAGATCTGTTGAGAAATGGCGGCGTTTTCATTAT
GATATAAAGATATTTAATCAGTGGCTAACAGAAGCTGAACAGTTT
CTCAGAAAGACACAAATTCCTGAGAATTGGGAACATGCTAAATAC
AAATGGTATCTTAAGGAACTCCAGGATGGCATTGGGCAGCGGCAA
ACTGTTGTCAGAACATTGAATGCAACTGGGGAAGAAATAATTCAG
CAATCCTCAAAAACAGATGCCAGTATTCTACAGGAAAAATTGGGA
AGCCTGAATCTGCGGTGGCAGGAGGTCTGCAAACAGCTGTCAGAC
AGAAAAAAGAGGCTAGAAGAACAAAAGCAGCCTGACCTAGCTCCT
GGACTGACCACTATTGGAGCCTCTCCTACTCAGACTGTTACTCTG
GTGACACAACCTGTGGTTACTAAGGAAACTGCCATCTCCAAACTA
GAAATGCCATCTTCCTTGATGTTGGAGGTACCTGAAGAAACTCAT
AGATTACTGCAACAGTTCCCCCTGGACCTGGAAAAGTTTCTTGCC
TGGCTTACAGAAGCTGAAACAACTGCCAATGTCCTACAGGATGCT
ACCCGTAAGGAAAGGCTCCTAGAAGACTCCAAGGGAGTAAAAGAG
CTGATGAAACAATGGCAAGACCTCCAAGGTGAAATTGAAGCTCAC
ACAGATGTTTATCACAACCTGGATGAAAACAGCCAAAAAATCCTG
AGATCCCTGGAAGGTTCCGATGATGCAGTCCTGTTACAAAGACGT
TTGGATAACATGAACTTCAAGTGGAGTGAACTTCGGAAAAAGTCT
CTCAACATTAGGTCCCATTTGGAAGCCAGTTCTGACCAGTGGAAG
CGTCTGGGTCCAGCATCTCAGCACTTTCTTTCCACGTCTGTCCAG
GGTCCCTGGGAGAGAGCCATCTCGCCAAACAAAGTGCCCTACTAT
ATCAACCACGAGACTCAAACAACTTGCTGGGACCATCCCAAAATG
ACAGAGCTCTACCAGTCTTTAGCTGACCTGAATAATGTCAGATTC
TCAGCTTATAGGACTGCCATGAAACTCCGAAGACTGCAGAAGGCC
CTTTGCTTGGATCTCTTGAGCCTGTCAGCTGCATGTGATGCCTTG
GACCAGCACAACCTCAAGCAAAATGACCAGCCCATGGATATCCTG
CAGATTATTAATTGTTTGACCACTATTTATGACCGCCTGGAGCAA
GAGCACAACAATTTGGTCAACGTCCCTCTCTGCGTGGATATGTGT
CTGAACTGGCTGCTGAATGTTTATGATACGGGACGAACAGGGAGG
ATCCGTGTCCTGTCTTTTAAAACTGGCATCATTTCCCTGTGTAAA
GCACATTTGGAAGACAAGTACAGATACCTTTTCAAGCAAGTGGCA
AGTTCAACAGGATTTTGTGACCAGCGCAGGCTGGGCCTCCTTCTG
CATGATTCTATCCAAATTCCAAGACAGTTGGGTGAAGTTGCATCC
TTTGGGGGCAGTAACATTGAGCCAAGTGTCCGGAGCTGCTTCCAA
TTTGCTAATAATAAGCCAGAGATCGAAGCGGCCCTCTTCCTAGAC
TGGATGAGACTGGAACCCCAGTCCATGGTGTGGCTGCCCGTCCTG
CACAGAGTGGCTGCTGCAGAAACTGCCAAGCATCAGGCCAAATGT
AACATCTGCAAAGAGTGTCCAATCATTGGATTCAGGTACAGGAGT
CTAAAGCACTTTAATTATGACATCTGCCAAAGCTGCTTTTTTTCT
GGTCGAGTTGCAAAAGGCCATAAAATGCACTATCCCATGGTGGAA
TATTGCACTCCGACTACATCAGGAGAAGATGTTCGAGACTTTGCC
AAGGTACTAAAAAACAAATTTCGAACCAAAAGGTATTTTGCGAAG
CATCCCCGAATGGGCTACCTGCCAGTGCAGACTGTCTTAGAGGGG
GACAACATGGAAACTCCCGTTACTCTGATCAACTTCTGGCCAGTA
GATTCTGCGCCTGCCTCGTCCCCTCAGCTTTCACACGATGATACT
CATTCACGCATTGAACATTATGCTAGCAGGCTAGCAGAAATGGAA
AACAGCAATGGATCTTATCTAAATGATAGCATCTCTCCTAATGAG
AGCATAGATGATGAACATTTGTTAATCCAGCATTACTGCCAAAGT
TTGAACCAGGACTCCCCCCTGAGCCAGCCTCGTAGTCCTGCCCAG
ATCTTGATTTCCTTAGAGAGTGAGGAAAGAGGGGAGCTAGAGAGA
ATCCTAGCAGATCTTGAGGAAGAAAACAGGAATCTGCAAGCAGAA
TATGACCGTCTAAAGCAGCAGCACGAACATAAAGGCCTGTCCCCA
CTGCCGTCCCCTCCTGAAATGATGCCCACCTCTCCCCAGAGTCCC
Human sequence with codon optimization:
(SEQ ID NO: 171)
ATGCTGTGGTGGGAGGAGGTGGAGGACTGCTACGAGCGGGAGGAC
GTGCAGAAGAAGACCTTCACCAAGTGGGTGAACGCCCAGTTCAGC
AAGTTCGGCAAGCAGCACATCGAGAACCTGTTCAGCGACCTGCAG
GACGGCCGGCGGCTGCTGGACCTGCTGGAGGGCCTGACCGGCCAG
AAGCTGCCCAAGGAGAAGGGCAGCACCCGGGTGCACGCCCTGAAC
AACGTGAACAAGGCCCTGCGGGTGCTGCAGAACAACAACGTGGAC
CTGGTGAACATCGGCAGCACCGACATCGTGGACGGCAACCACAAG
CTGACCCTGGGCCTGATCTGGAACATCATCCTGCACTGGCAGGTG
AAGAACGTGATGAAGAACATCATGGCCGGCCTGCAGCAGACCAAC
AGCGAGAAGATCCTGCTGAGCTGGGTGCGGCAGAGCACCCGGAAC
TACCCCCAGGTGAACGTGATCAACTTCACCACCAGCTGGAGCGAC
GGCCTGGCCCTGAACGCCCTGATCCACAGCCACCGGCCCGACCTG
TTCGACTGGAACAGCGTGGTGTGCCAGCAGAGCGCCACCCAGCGG
CTGGAGCACGCCTTCAACATCGCCCGGTACCAGCTGGGCATCGAG
AAGCTGCTGGACCCCGAGGACGTGGACACCACCTACCCCGACAAG
AAGAGCATCCTGATGTACATCACCAGCCTGTTCCAGGTGCTGCCC
CAGCAGGTGAGCATCGAGGCCATCCAGGAGGTGGAGATGCTGCCC
CGGCCCCCCAAGGTGACCAAGGAGGAGCACTTCCAGCTGCACCAC
CAGATGCACTACAGCCAGCAGATCACCGTGAGCCTGGCCCAGGGC
TACGAGCGGACCAGCAGCCCCAAGCCCCGGTTCAAGAGCTACGCC
TACACCCAGGCCGCCTACGTGACCACCAGCGACCCCACCCGGAGC
CCCTTCCCCAGCCAGCACCTGGAGGCCCCCGAGGACAAGAGCTTC
GGCAGCAGCCTGATGGAGAGCGAGGTGAACCTGGACCGGTACCAG
ACCGCCCTGGAGGAGGTGCTGAGCTGGCTGCTGAGCGCCGAGGAC
ACCCTGCAGGCCCAGGGCGAGATCAGCAACGACGTGGAGGTGGTG
AAGGACCAGTTCCACACCCACGAGGGCTACATGATGGACCTGACC
GCCCACCAGGGCCGGGTGGGCAACATCCTGCAGCTGGGCAGCAAG
CTGATCGGCACCGGCAAGCTGAGCGAGGACGAGGAGACCGAGGTG
CAGGAGCAGATGAACCTGCTGAACAGCCGGTGGGAGTGCCTGCGG
GTGGCCAGCATGGAGAAGCAGAGCAACCTGCACCGGGTGCTGATG
GACCTGCAGAACCAGAAGCTGAAGGAGCTGAACGACTGGCTGACC
AAGACCGAGGAGCGGACCCGGAAGATGGAGGAGGAGCCCCTGGGC
CCCGACCTGGAGGACCTGAAGCGGCAGGTGCAGCAGCACAAGGTG
CTGCAGGAGGACCTGGAGCAGGAGCAGGTGCGGGTGAACAGCCTG
ACCCACATGGTGGTGGTGGTGGACGAGAGCAGCGGCGACCACGCC
ACCGCCGCCCTGGAGGAGCAGCTGAAGGTGCTGGGCGACCGGTGG
GCCAACATCTGCCGGTGGACCGAGGACCGGTGGGTGCTGCTGCAG
GACCGGTTCGACCGGAGCGTGGAGAAGTGGCGGCGGTTCCACTAC
GACATCAAGATCTTCAACCAGTGGCTGACCGAGGCCGAGCAGTTC
CTGCGGAAGACCCAGATCCCCGAGAACTGGGAGCACGCCAAGTAC
AAGTGGTACCTGAAGGAGCTGCAGGACGGCATCGGCCAGCGGCAG
ACCGTGGTGCGGACCCTGAACGCCACCGGCGAGGAGATCATCCAG
CAGAGCAGCAAGACCGACGCCAGCATCCTGCAGGAGAAGCTGGGC
AGCCTGAACCTGCGGTGGCAGGAGGTGTGCAAGCAGCTGAGCGAC
CGGAAGAAGCGGCTGGAGGAGCAGAAGCAGCCCGACCTGGCCCCC
GGCCTGACCACCATCGGCGCCAGCCCCACCCAGACCGTGACCCTG
GTGACCCAGCCCGTGGTGACCAAGGAGACCGCCATCAGCAAGCTG
GAGATGCCCAGCAGCCTGATGCTGGAGGTGCCCGAGGAGACCCAC
CGGCTGCTGCAGCAGTTCCCCCTGGACCTGGAGAAGTTCCTGGCC
TGGCTGACCGAGGCCGAGACCACCGCCAACGTGCTGCAGGACGCC
ACCCGGAAGGAGCGGCTGCTGGAGGACAGCAAGGGCGTGAAGGAG
CTGATGAAGCAGTGGCAGGACCTGCAGGGCGAGATCGAGGCCCAC
ACCGACGTGTACCACAACCTGGACGAGAACAGCCAGAAGATCCTG
CGGAGCCTGGAGGGCAGCGACGACGCCGTGCTGCTGCAGCGGCGG
CTGGACAACATGAACTTCAAGTGGAGCGAGCTGCGGAAGAAGAGC
CTGAACATCCGGAGCCACCTGGAGGCCAGCAGCGACCAGTGGAAG
CGGCTGGGCCCCGCCAGCCAGCACTTCCTGAGCACCAGCGTGCAG
GGCCCCTGGGAGCGGGCCATCAGCCCCAACAAGGTGCCCTACTAC
ATCAACCACGAGACCCAGACCACCTGCTGGGACCACCCCAAGATG
ACCGAGCTGTACCAGAGCCTGGCCGACCTGAACAACGTGCGGTTC
AGCGCCTACCGGACCGCCATGAAGCTGCGGCGGCTGCAGAAGGCC
CTGTGCCTGGACCTGCTGAGCCTGAGCGCCGCCTGCGACGCCCTG
GACCAGCACAACCTGAAGCAGAACGACCAGCCCATGGACATCCTG
CAGATCATCAACTGCCTGACCACCATCTACGACCGGCTGGAGCAG
GAGCACAACAACCTGGTGAACGTGCCCCTGTGCGTGGACATGTGC
CTGAACTGGCTGCTGAACGTGTACGACACCGGCCGGACCGGCCGG
ATCCGGGTGCTGAGCTTCAAGACCGGCATCATCAGCCTGTGCAAG
GCCCACCTGGAGGACAAGTACCGGTACCTGTTCAAGCAGGTGGCC
AGCAGCACCGGCTTCTGCGACCAGCGGCGGCTGGGCCTGCTGCTG
CACGACAGCATCCAGATCCCCCGGCAGCTGGGCGAGGTGGCCAGC
TTCGGCGGCAGCAACATCGAGCCCAGCGTGCGGAGCTGCTTCCAG
TTCGCCAACAACAAGCCCGAGATCGAGGCCGCCCTGTTCCTGGAC
TGGATGCGGCTGGAGCCCCAGAGCATGGTGTGGCTGCCCGTGCTG
CACCGGGTGGCCGCCGCCGAGACCGCCAAGCACCAGGCCAAGTGC
AACATCTGCAAGGAGTGCCCCATCATCGGCTTCCGGTACCGGAGC
CTGAAGCACTTCAACTACGACATCTGCCAGAGCTGCTTCTTCAGC
GGCCGGGTGGCCAAGGGCCACAAGATGCACTACCCCATGGTGGAG
TACTGCACCCCCACCACCAGCGGCGAGGACGTGCGGGACTTCGCC
AAGGTGCTGAAGAACAAGTTCCGGACCAAGCGGTACTTCGCCAAG
CACCCCCGGATGGGCTACCTGCCCGTGCAGACCGTGCTGGAGGGC
GACAACATGGAGACCCCCGTGACCCTGATCAACTTCTGGCCCGTG
GACAGCGCCCCCGCCAGCAGCCCCCAGCTGAGCCACGACGACACC
CACAGCCGGATCGAGCACTACGCCAGCCGGCTGGCCGAGATGGAG
AACAGCAACGGCAGCTACCTGAACGACAGCATCAGCCCCAACGAG
AGCATCGACGACGAGCACCTGCTGATCCAGCACTACTGCCAGAGC
CTGAACCAGGACAGCCCCCTGAGCCAGCCCCGGAGCCCCGCCCAG
ATCCTGATCAGCCTGGAGAGCGAGGAGCGGGGCGAGCTGGAGCGG
ATCCTGGCCGACCTGGAGGAGGAGAACCGGAACCTGCAGGCCGAG
TACGACCGGCTGAAGCAGCAGCACGAGCACAAGGGCCTGAGCCCC
CTGCCCAGCCCCCCCGAGATGATGCCCACCAGCCCCCAGAGCCCC
Nterm-R1_R17_H3_R21-R22_H4-
trCterm + SynBS + coiled coil
Human sequence without codon alterations:
(SEQ ID NO: 172)
ATGCTTTGGTGGGAAGAAGTAGAGGACTGTTATGAAAGAGAAGAT
GTTCAAAAGAAAACATTCACAAAATGGGTAAATGCACAATTTTCT
AAGTTTGGGAAGCAGCATATTGAGAACCTCTTCAGTGACCTACAG
GATGGGAGGCGCCTCCTAGACCTCCTCGAAGGCCTGACAGGGCAA
AAACTGCCAAAAGAAAAAGGATCCACAAGAGTTCATGCCCTGAAC
AATGTCAACAAGGCACTGCGGGTTTTGCAGAACAATAATGTTGAT
TTAGTGAATATTGGAAGTACTGACATCGTAGATGGAAATCATAAA
CTGACTCTTGGTTTGATTTGGAATATAATCCTCCACTGGCAGGTC
AAAAATGTAATGAAAAATATCATGGCTGGATTGCAACAAACCAAC
AGTGAAAAGATTCTCCTGAGCTGGGTCCGACAATCAACTCGTAAT
TATCCACAGGTTAATGTAATCAACTTCACCACCAGCTGGTCTGAT
GGCCTGGCTTTGAATGCTCTCATCCATAGTCATAGGCCAGACCTA
TTTGACTGGAATAGTGTGGTTTGCCAGCAGTCAGCCACACAACGA
CTGGAACATGCATTCAACATCGCCAGATATCAATTAGGCATAGAG
AAACTACTCGATCCTGAAGATGTTGATACCACCTATCCAGATAAG
AAGTCCATCTTAATGTACATCACATCACTCTTCCAAGTTTTGCCT
CAACAAGTGAGCATTGAAGCCATCCAGGAAGTGGAAATGTTGCCA
AGGCCACCTAAAGTGACTAAAGAAGAACATTTTCAGTTACATCAT
CAAATGCACTATTCTCAACAGATCACGGTCAGTCTAGCACAGGGA
TATGAGAGAACTTCTTCCCCTAAGCCTCGATTCAAGAGCTATGCC
TACACACAGGCTGCTTATGTCACCACCTCTGACCCTACACGGAGC
CCATTTCCTTCACAGCATTTGGAAGCTCCTGAAGACAAGTCATTT
GGCAGTTCATTGATGGAGAGTGAAGTAAACCTGGACCGTTATCAA
ACAGCTTTAGAAGAAGTATTATCGTGGCTTCTTTCTGCTGAGGAC
ACATTGCAAGCACAAGGAGAGATTTCTAATGATGTGGAAGTGGTG
AAAGACCAGTTTCATACTCATGAGGGGTACATGATGGATTTGACA
GCCCATCAGGGCCGGGTTGGTAATATTCTACAATTGGGAAGTAAG
CTGATTGGAACAGGAAAATTATCAGAAGATGAAGAAACTGAAGTA
CAAGAGCAGATGAATCTCCTAAATTCAAGATGGGAATGCCTCAGG
GTAGCTAGCATGGAAAAACAAAGCAATTTACATAGAGTTTTAATG
GATCGATTTGACAGATCTGTTGAGAAATGGCGGCGTTTTCATTAT
GATATAAAGATATTTAATCAGTGGCTAACAGAAGCTGAACAGTTT
CTCAGAAAGACACAAATTCCTGAGAATTGGGAACATGCTAAATAC
AAATGGTATCTTAAGGAACTCCAGGATGGCATTGGGCAGCGGCAA
ACTGTTGTCAGAACATTGAATGCAACTGGGGAAGAAATAATTCAG
CAATCCTCAAAAACAGATGCCAGTATTCTACAGGAAAAATTGGGA
AGCCTGAATCTGCGGTGGCAGGAGGTCTGCAAACAGCTGTCAGAC
AGAAAAAAGAGGCTAGAAGAACAAAAGCAGCCTGACCTAGCTCCT
GGACTGACCACTATTGGAGCCTCTCCTACTCAGACTGTTACTCTG
GTGACACAACCTGTGGTTACTAAGGAAACTGCCATCTCCAAACTA
GAAATGCCATCTTCCTTGATGTTGGAGGTACCTAAGGATTCAACA
CAATGGCTGGAAGCTAAGGAAGAAGCTGAGCAGGTCTTAGGACAG
GCCAGAGCCAAGCTTGAGTCATGGAAGGAGGGTCCCTATACAGTA
GATGCAATCCAAAAGAAAATCACAGAAACCAAGCAGTTGGCCAAA
GACCTCCGCCAGTGGCAGACAAATGTAGATGTGGCAAATGACTTG
GCCCTGAAACTTCTCCGGGATTATTCTGCAGATGATACCAGAAAA
GTCCACATGATAACAGAGAATATCAATGCCTCTTGGAGAAGCATT
CATAAAAGGGTGAGTGAGCGAGAGGCTGCTTTGGAAGAAACTCAT
AGATTACTGCAACAGTTCCCCCTGGACCTGGAAAAGTTTCTTGCC
TGGCTTACAGAAGCTGAAACAACTGCCAATGTCCTACAGGATGCT
ACCCGTAAGGAAAGGCTCCTAGAAGACTCCAAGGGAGTAAAAGAG
CTGATGAAACAATGGCAAGACCTCCAAGGTGAAATTGAAGCTCAC
ACAGATGTTTATCACAACCTGGATGAAAACAGCCAAAAAATCCTG
AGATCCCTGGAAGGTTCCGATGATGCAGTCCTGTTACAAAGACGT
TTGGATAACATGAACTTCAAGTGGAGTGAACTTCGGAAAAAGTCT
CTCAACATTAGGTCCCATTTGGAAGCCAGTTCTGACCAGTGGAAG
CGTCTGGGTCCAGCATCTCAGCACTTTCTTTCCACGTCTGTCCAG
GGTCCCTGGGAGAGAGCCATCTCGCCAAACAAAGTGCCCTACTAT
ATCAACCACGAGACTCAAACAACTTGCTGGGACCATCCCAAAATG
ACAGAGCTCTACCAGTCTTTAGCTGACCTGAATAATGTCAGATTC
TCAGCTTATAGGACTGCCATGAAACTCCGAAGACTGCAGAAGGCC
CTTTGCTTGGATCTCTTGAGCCTGTCAGCTGCATGTGATGCCTTG
GACCAGCACAACCTCAAGCAAAATGACCAGCCCATGGATATCCTG
CAGATTATTAATTGTTTGACCACTATTTATGACCGCCTGGAGCAA
GAGCACAACAATTTGGTCAACGTCCCTCTCTGCGTGGATATGTGT
CTGAACTGGCTGCTGAATGTTTATGATACGGGACGAACAGGGAGG
ATCCGTGTCCTGTCTTTTAAAACTGGCATCATTTCCCTGTGTAAA
GCACATTTGGAAGACAAGTACAGATACCTTTTCAAGCAAGTGGCA
AGTTCAACAGGATTTTGTGACCAGCGCAGGCTGGGCCTCCTTCTG
CATGATTCTATCCAAATTCCAAGACAGTTGGGTGAAGTTGCATCC
TTTGGGGGCAGTAACATTGAGCCAAGTGTCCGGAGCTGCTTCCAA
TTTGCTAATAATAAGCCAGAGATCGAAGCGGCCCTCTTCCTAGAC
TGGATGAGACTGGAACCCCAGTCCATGGTGTGGCTGCCCGTCCTG
CACAGAGTGGCTGCTGCAGAAACTGCCAAGCATCAGGCCAAATGT
AACATCTGCAAAGAGTGTCCAATCATTGGATTCAGGTACAGGAGT
CTAAAGCACTTTAATTATGACATCTGCCAAAGCTGCTTTTTTTCT
GGTCGAGTTGCAAAAGGCCATAAAATGCACTATCCCATGGTGGAA
TATTGCACTCCGACTACATCAGGAGAAGATGTTCGAGACTTTGCC
AAGGTACTAAAAAACAAATTTCGAACCAAAAGGTATTTTGCGAAG
CATCCCCGAATGGGCTACCTGCCAGTGCAGACTGTCTTAGAGGGG
GACAACATGGAAACTCCCGTTACTCTGATCAACTTCTGGCCAGTA
GATTCTGCGCCTGCCTCGTCCCCTCAGCTTTCACACGATGATACT
CATTCACGCATTGAACATTATGCTAGCAGGCTAGCAGAAATGGAA
AACAGCAATGGATCTTATCTAAATGATAGCATCTCTCCTAATGAG
AGCATAGATGATGAACATTTGTTAATCCAGCATTACTGCCAAAGT
TTGAACCAGGACTCCCCCCTGAGCCAGCCTCGTAGTCCTGCCCAG
ATCTTGATTTCCTTAGAGAGTGAGGAAAGAGGGGAGCTAGAGAGA
ATCCTAGCAGATCTTGAGGAAGAAAACAGGAATCTGCAAGCAGAA
TATGACCGTCTAAAGCAGCAGCACGAACATAAAGGCCTGTCCCCA
CTGCCGTCCCCTCCTGAAATGATGCCCACCTCTCCCCAGAGTCCC
Human sequence with codon optimization:
(SEQ ID NO: 173)
ATGCTGTGGTGGGAGGAGGTGGAGGACTGCTACGAGCGGGAGGAC
GTGCAGAAGAAGACCTTCACCAAGTGGGTGAACGCCCAGTTCAGC
AAGTTCGGCAAGCAGCACATCGAGAACCTGTTCAGCGACCTGCAG
GACGGCCGGCGGCTGCTGGACCTGCTGGAGGGCCTGACCGGCCAG
AAGCTGCCCAAGGAGAAGGGCAGCACCCGGGTGCACGCCCTGAAC
AACGTGAACAAGGCCCTGCGGGTGCTGCAGAACAACAACGTGGAC
CTGGTGAACATCGGCAGCACCGACATCGTGGACGGCAACCACAAG
CTGACCCTGGGCCTGATCTGGAACATCATCCTGCACTGGCAGGTG
AAGAACGTGATGAAGAACATCATGGCCGGCCTGCAGCAGACCAAC
AGCGAGAAGATCCTGCTGAGCTGGGTGCGGCAGAGCACCCGGAAC
TACCCCCAGGTGAACGTGATCAACTTCACCACCAGCTGGAGCGAC
GGCCTGGCCCTGAACGCCCTGATCCACAGCCACCGGCCCGACCTG
TTCGACTGGAACAGCGTGGTGTGCCAGCAGAGCGCCACCCAGCGG
CTGGAGCACGCCTTCAACATCGCCCGGTACCAGCTGGGCATCGAG
AAGCTGCTGGACCCCGAGGACGTGGACACCACCTACCCCGACAAG
AAGAGCATCCTGATGTACATCACCAGCCTGTTCCAGGTGCTGCCC
CAGCAGGTGAGCATCGAGGCCATCCAGGAGGTGGAGATGCTGCCC
CGGCCCCCCAAGGTGACCAAGGAGGAGCACTTCCAGCTGCACCAC
CAGATGCACTACAGCCAGCAGATCACCGTGAGCCTGGCCCAGGGC
TACGAGCGGACCAGCAGCCCCAAGCCCCGGTTCAAGAGCTACGCC
TACACCCAGGCCGCCTACGTGACCACCAGCGACCCCACCCGGAGC
CCCTTCCCCAGCCAGCACCTGGAGGCCCCCGAGGACAAGAGCTTC
GGCAGCAGCCTGATGGAGAGCGAGGTGAACCTGGACCGGTACCAG
ACCGCCCTGGAGGAGGTGCTGAGCTGGCTGCTGAGCGCCGAGGAC
ACCCTGCAGGCCCAGGGCGAGATCAGCAACGACGTGGAGGTGGTG
AAGGACCAGTTCCACACCCACGAGGGCTACATGATGGACCTGACC
GCCCACCAGGGCCGGGTGGGCAACATCCTGCAGCTGGGCAGCAAG
CTGATCGGCACCGGCAAGCTGAGCGAGGACGAGGAGACCGAGGTG
CAGGAGCAGATGAACCTGCTGAACAGCCGGTGGGAGTGCCTGCGG
GTGGCCAGCATGGAGAAGCAGAGCAACCTGCACCGGGTGCTGATG
GACCGGTTCGACCGGAGCGTGGAGAAGTGGCGGCGGTTCCACTAC
GACATCAAGATCTTCAACCAGTGGCTGACCGAGGCCGAGCAGTTC
CTGCGGAAGACCCAGATCCCCGAGAACTGGGAGCACGCCAAGTAC
AAGTGGTACCTGAAGGAGCTGCAGGACGGCATCGGCCAGCGGCAG
ACCGTGGTGCGGACCCTGAACGCCACCGGCGAGGAGATCATCCAG
CAGAGCAGCAAGACCGACGCCAGCATCCTGCAGGAGAAGCTGGGC
AGCCTGAACCTGCGGTGGCAGGAGGTGTGCAAGCAGCTGAGCGAC
CGGAAGAAGCGGCTGGAGGAGCAGAAGCAGCCCGACCTGGCCCCC
GGCCTGACCACCATCGGCGCCAGCCCCACCCAGACCGTGACCCTG
GTGACCCAGCCCGTGGTGACCAAGGAGACCGCCATCAGCAAGCTG
GAGATGCCCAGCAGCCTGATGCTGGAGGTGCCCAAGGACAGCACC
CAGTGGCTGGAGGCCAAGGAGGAGGCCGAGCAGGTGCTGGGCCAG
GCCCGGGCCAAGCTGGAGAGCTGGAAGGAGGGCCCCTACACCGTG
GACGCCATCCAGAAGAAGATCACCGAGACCAAGCAGCTGGCCAAG
GACCTGCGGCAGTGGCAGACCAACGTGGACGTGGCCAACGACCTG
GCCCTGAAGCTGCTGCGGGACTACAGCGCCGACGACACCCGGAAG
GTGCACATGATCACCGAGAACATCAACGCCAGCTGGCGGAGCATC
CACAAGCGGGTGAGCGAGCGGGAGGCCGCCCTGGAGGAGACCCAC
CGGCTGCTGCAGCAGTTCCCCCTGGACCTGGAGAAGTTCCTGGCC
TGGCTGACCGAGGCCGAGACCACCGCCAACGTGCTGCAGGACGCC
ACCCGGAAGGAGCGGCTGCTGGAGGACAGCAAGGGCGTGAAGGAG
CTGATGAAGCAGTGGCAGGACCTGCAGGGCGAGATCGAGGCCCAC
ACCGACGTGTACCACAACCTGGACGAGAACAGCCAGAAGATCCTG
CGGAGCCTGGAGGGCAGCGACGACGCCGTGCTGCTGCAGCGGCGG
CTGGACAACATGAACTTCAAGTGGAGCGAGCTGCGGAAGAAGAGC
CTGAACATCCGGAGCCACCTGGAGGCCAGCAGCGACCAGTGGAAG
CGGCTGGGCCCCGCCAGCCAGCACTTCCTGAGCACCAGCGTGCAG
GGCCCCTGGGAGCGGGCCATCAGCCCCAACAAGGTGCCCTACTAC
ATCAACCACGAGACCCAGACCACCTGCTGGGACCACCCCAAGATG
ACCGAGCTGTACCAGAGCCTGGCCGACCTGAACAACGTGCGGTTC
AGCGCCTACCGGACCGCCATGAAGCTGCGGCGGCTGCAGAAGGCC
CTGTGCCTGGACCTGCTGAGCCTGAGCGCCGCCTGCGACGCCCTG
GACCAGCACAACCTGAAGCAGAACGACCAGCCCATGGACATCCTG
CAGATCATCAACTGCCTGACCACCATCTACGACCGGCTGGAGCAG
GAGCACAACAACCTGGTGAACGTGCCCCTGTGCGTGGACATGTGC
CTGAACTGGCTGCTGAACGTGTACGACACCGGCCGGACCGGCCGG
ATCCGGGTGCTGAGCTTCAAGACCGGCATCATCAGCCTGTGCAAG
GCCCACCTGGAGGACAAGTACCGGTACCTGTTCAAGCAGGTGGCC
AGCAGCACCGGCTTCTGCGACCAGCGGCGGCTGGGCCTGCTGCTG
CACGACAGCATCCAGATCCCCCGGCAGCTGGGCGAGGTGGCCAGC
TTCGGCGGCAGCAACATCGAGCCCAGCGTGCGGAGCTGCTTCCAG
TTCGCCAACAACAAGCCCGAGATCGAGGCCGCCCTGTTCCTGGAC
TGGATGCGGCTGGAGCCCCAGAGCATGGTGTGGCTGCCCGTGCTG
CACCGGGTGGCCGCCGCCGAGACCGCCAAGCACCAGGCCAAGTGC
AACATCTGCAAGGAGTGCCCCATCATCGGCTTCCGGTACCGGAGC
CTGAAGCACTTCAACTACGACATCTGCCAGAGCTGCTTCTTCAGC
GGCCGGGTGGCCAAGGGCCACAAGATGCACTACCCCATGGTGGAG
TACTGCACCCCCACCACCAGCGGCGAGGACGTGCGGGACTTCGCC
AAGGTGCTGAAGAACAAGTTCCGGACCAAGCGGTACTTCGCCAAG
CACCCCCGGATGGGCTACCTGCCCGTGCAGACCGTGCTGGAGGGC
GACAACATGGAGACCCCCGTGACCCTGATCAACTTCTGGCCCGTG
GACAGCGCCCCCGCCAGCAGCCCCCAGCTGAGCCACGACGACACC
CACAGCCGGATCGAGCACTACGCCAGCCGGCTGGCCGAGATGGAG
AACAGCAACGGCAGCTACCTGAACGACAGCATCAGCCCCAACGAG
AGCATCGACGACGAGCACCTGCTGATCCAGCACTACTGCCAGAGC
CTGAACCAGGACAGCCCCCTGAGCCAGCCCCGGAGCCCCGCCCAG
ATCCTGATCAGCCTGGAGAGCGAGGAGCGGGGCGAGCTGGAGCGG
ATCCTGGCCGACCTGGAGGAGGAGAACCGGAACCTGCAGGCCGAG
TACGACCGGCTGAAGCAGCAGCACGAGCACAAGGGCCTGAGCCCC
CTGCCCAGCCCCCCCGAGATGATGCCCACCAGCCCCCAGAGCCCC
Nterm-R2_R17_R21-R22_H4-trCterm + SynBS
Human sequence without codon alterations:
(SEQ ID NO: 174)
ATGCTTTGGTGGGAAGAAGTAGAGGACTGTTATGAAAGAGAAGAT
GTTCAAAAGAAAACATTCACAAAATGGGTAAATGCACAATTTTCT
AAGTTTGGGAAGCAGCATATTGAGAACCTCTTCAGTGACCTACAG
GATGGGAGGCGCCTCCTAGACCTCCTCGAAGGCCTGACAGGGCAA
AAACTGCCAAAAGAAAAAGGATCCACAAGAGTTCATGCCCTGAAC
AATGTCAACAAGGCACTGCGGGTTTTGCAGAACAATAATGTTGAT
TTAGTGAATATTGGAAGTACTGACATCGTAGATGGAAATCATAAA
CTGACTCTTGGTTTGATTTGGAATATAATCCTCCACTGGCAGGTC
AAAAATGTAATGAAAAATATCATGGCTGGATTGCAACAAACCAAC
AGTGAAAAGATTCTCCTGAGCTGGGTCCGACAATCAACTCGTAAT
TATCCACAGGTTAATGTAATCAACTTCACCACCAGCTGGTCTGAT
GGCCTGGCTTTGAATGCTCTCATCCATAGTCATAGGCCAGACCTA
TTTGACTGGAATAGTGTGGTTTGCCAGCAGTCAGCCACACAACGA
CTGGAACATGCATTCAACATCGCCAGATATCAATTAGGCATAGAG
AAACTACTCGATCCTGAAGATGTTGATACCACCTATCCAGATAAG
AAGTCCATCTTAATGTACATCACATCACTCTTCCAAGTTTTGCCT
CAACAAGTGAGCATTGAAGCCATCCAGGAAGTGGAAATGTTGCCA
AGGCCACCTAAAGTGACTAAAGAAGAACATTTTCAGTTACATCAT
CAAATGCACTATTCTCAACAGATCACGGTCAGTCTAGCACAGGGA
TATGAGAGAACTTCTTCCCCTAAGCCTCGATTCAAGAGCTATGCC
TACACACAGGCTGCTTATGTCACCACCTCTGACCCTACACGGAGC
CCATTTCCTTCACAGCATTTGGAAGCTCCTGAAGACAAGTCATTT
GGCAGTTCATTGATGGAGAGTGAAGTAAACCTGGACCGTTATCAA
ACAGCTTTAGAAGAAGTATTATCGTGGCTTCTTTCTGCTGAGGAC
ACATTGCAAGCACAAGGAGAGATTTCTAATGATGTGGAAGTGGTG
AAAGACCAGTTTCATACTCATGAGGGGTACATGATGGATTTGACA
GCCCATCAGGGCCGGGTTGGTAATATTCTACAATTGGGAAGTAAG
CTGATTGGAACAGGAAAATTATCAGAAGATGAAGAAACTGAAGTA
CAAGAGCAGATGAATCTCCTAAATTCAAGATGGGAATGCCTCAGG
GTAGCTAGCATGGAAAAACAAAGCAATTTACATAGAGTTTTAATG
GATCTCCAGAATCAGAAACTGAAAGAGTTGAATGACTGGCTAACA
AAAACAGAAGAAAGAACAAGGAAAATGGAGGAAGAGCCTCTTGGA
CCTGATCTTGAAGACCTAAAACGCCAAGTACAACAACATAAGGTG
CTTCAAGAAGATCTAGAACAAGAACAAGTCAGGGTCAATTCTCTC
ACTCACATGGTGGTGGTAGTTGATGAATCTAGTGGAGATCACGCA
ACTGCTGCTTTGGAAGAACAACTTAAGGTATTGGGAGATCGATGG
GCAAACATCTGTAGATGGACAGAAGACCGCTGGGTTCTTTTACAA
GACCGATTTGACAGATCTGTTGAGAAATGGCGGCGTTTTCATTAT
GATATAAAGATATTTAATCAGTGGCTAACAGAAGCTGAACAGTTT
CTCAGAAAGACACAAATTCCTGAGAATTGGGAACATGCTAAATAC
AAATGGTATCTTAAGGAACTCCAGGATGGCATTGGGCAGCGGCAA
ACTGTTGTCAGAACATTGAATGCAACTGGGGAAGAAATAATTCAG
CAATCCTCAAAAACAGATGCCAGTATTCTACAGGAAAAATTGGGA
AGCCTGAATCTGCGGTGGCAGGAGGTCTGCAAACAGCTGTCAGAC
AGAAAAAAGAGGCTAGAAGAACAAAAGAAGGATTCAACACAATGG
CTGGAAGCTAAGGAAGAAGCTGAGCAGGTCTTAGGACAGGCCAGA
GCCAAGCTTGAGTCATGGAAGGAGGGTCCCTATACAGTAGATGCA
ATCCAAAAGAAAATCACAGAAACCAAGCAGTTGGCCAAAGACCTC
CGCCAGTGGCAGACAAATGTAGATGTGGCAAATGACTTGGCCCTG
AAACTTCTCCGGGATTATTCTGCAGATGATACCAGAAAAGTCCAC
ATGATAACAGAGAATATCAATGCCTCTTGGAGAAGCATTCATAAA
AGGGTGAGTGAGCGAGAGGCTGCTTTGGAAGAAACTCATAGATTA
CTGCAACAGTTCCCCCTGGACCTGGAAAAGTTTCTTGCCTGGCTT
ACAGAAGCTGAAACAACTGCCAATGTCCTACAGGATGCTACCCGT
AAGGAAAGGCTCCTAGAAGACTCCAAGGGAGTAAAAGAGCTGATG
AAACAATGGCAAGACCTCCAAGGTGAAATTGAAGCTCACACAGAT
GTTTATCACAACCTGGATGAAAACAGCCAAAAAATCCTGAGATCC
CTGGAAGGTTCCGATGATGCAGTCCTGTTACAAAGACGTTTGGAT
AACATGAACTTCAAGTGGAGTGAACTTCGGAAAAAGTCTCTCAAC
ATTAGGTCCCATTTGGAAGCCAGTTCTGACCAGTGGAAGCGTCTG
GGTCCAGCATCTCAGCACTTTCTTTCCACGTCTGTCCAGGGTCCC
TGGGAGAGAGCCATCTCGCCAAACAAAGTGCCCTACTATATCAAC
CACGAGACTCAAACAACTTGCTGGGACCATCCCAAAATGACAGAG
CTCTACCAGTCTTTAGCTGACCTGAATAATGTCAGATTCTCAGCT
TATAGGACTGCCATGAAACTCCGAAGACTGCAGAAGGCCCTTTGC
TTGGATCTCTTGAGCCTGTCAGCTGCATGTGATGCCTTGGACCAG
CACAACCTCAAGCAAAATGACCAGCCCATGGATATCCTGCAGATT
ATTAATTGTTTGACCACTATTTATGACCGCCTGGAGCAAGAGCAC
AACAATTTGGTCAACGTCCCTCTCTGCGTGGATATGTGTCTGAAC
TGGCTGCTGAATGTTTATGATACGGGACGAACAGGGAGGATCCGT
GTCCTGTCTTTTAAAACTGGCATCATTTCCCTGTGTAAAGCACAT
TTGGAAGACAAGTACAGATACCTTTTCAAGCAAGTGGCAAGTTCA
ACAGGATTTTGTGACCAGCGCAGGCTGGGCCTCCTTCTGCATGAT
TCTATCCAAATTCCAAGACAGTTGGGTGAAGTTGCATCCTTTGGG
GGCAGTAACATTGAGCCAAGTGTCCGGAGCTGCTTCCAATTTGCT
AATAATAAGCCAGAGATCGAAGCGGCCCTCTTCCTAGACTGGATG
AGACTGGAACCCCAGTCCATGGTGTGGCTGCCCGTCCTGCACAGA
GTGGCTGCTGCAGAAACTGCCAAGCATCAGGCCAAATGTAACATC
TGCAAAGAGTGTCCAATCATTGGATTCAGGTACAGGAGTCTAAAG
CACTTTAATTATGACATCTGCCAAAGCTGCTTTTTTTCTGGTCGA
GTTGCAAAAGGCCATAAAATGCACTATCCCATGGTGGAATATTGC
ACTCCGACTACATCAGGAGAAGATGTTCGAGACTTTGCCAAGGTA
CTAAAAAACAAATTTCGAACCAAAAGGTATTTTGCGAAGCATCCC
CGAATGGGCTACCTGCCAGTGCAGACTGTCTTAGAGGGGGACAAC
ATGGAAACTCCCGTTACTCTGATCAACTTCTGGCCAGTAGATTCT
GCGCCTGCCTCGTCCCCTCAGCTTTCACACGATGATACTCATTCA
CGCATTGAACATTATGCTAGCAGGCTAGCAGAAATGGAAAACAGC
AATGGATCTTATCTAAATGATAGCATCTCTCCTAATGAGAGCATA
GATGATGAACATTTGTTAATCCAGCATTACTGCCAAAGTTTGAAC
CAGGACTCCCCCCTGAGCCAGCCTCGTAGT
Human sequence with codon optimization:
(SEQ ID NO: 175)
ATGCTGTGGTGGGAGGAGGTGGAGGACTGCTACGAGCGGGAGGAC
GTGCAGAAGAAGACCTTCACCAAGTGGGTGAACGCCCAGTTCAGC
AAGTTCGGCAAGCAGCACATCGAGAACCTGTTCAGCGACCTGCAG
GACGGCCGGCGGCTGCTGGACCTGCTGGAGGGCCTGACCGGCCAG
AAGCTGCCCAAGGAGAAGGGCAGCACCCGGGTGCACGCCCTGAAC
AACGTGAACAAGGCCCTGCGGGTGCTGCAGAACAACAACGTGGAC
CTGGTGAACATCGGCAGCACCGACATCGTGGACGGCAACCACAAG
CTGACCCTGGGCCTGATCTGGAACATCATCCTGCACTGGCAGGTG
AAGAACGTGATGAAGAACATCATGGCCGGCCTGCAGCAGACCAAC
AGCGAGAAGATCCTGCTGAGCTGGGTGCGGCAGAGCACCCGGAAC
TACCCCCAGGTGAACGTGATCAACTTCACCACCAGCTGGAGCGAC
GGCCTGGCCCTGAACGCCCTGATCCACAGCCACCGGCCCGACCTG
TTCGACTGGAACAGCGTGGTGTGCCAGCAGAGCGCCACCCAGCGG
CTGGAGCACGCCTTCAACATCGCCCGGTACCAGCTGGGCATCGAG
AAGCTGCTGGACCCCGAGGACGTGGACACCACCTACCCCGACAAG
AAGAGCATCCTGATGTACATCACCAGCCTGTTCCAGGTGCTGCCC
CAGCAGGTGAGCATCGAGGCCATCCAGGAGGTGGAGATGCTGCCC
CGGCCCCCCAAGGTGACCAAGGAGGAGCACTTCCAGCTGCACCAC
CAGATGCACTACAGCCAGCAGATCACCGTGAGCCTGGCCCAGGGC
TACGAGCGGACCAGCAGCCCCAAGCCCCGGTTCAAGAGCTACGCC
TACACCCAGGCCGCCTACGTGACCACCAGCGACCCCACCCGGAGC
CCCTTCCCCAGCCAGCACCTGGAGGCCCCCGAGGACAAGAGCTTC
GGCAGCAGCCTGATGGAGAGCGAGGTGAACCTGGACCGGTACCAG
ACCGCCCTGGAGGAGGTGCTGAGCTGGCTGCTGAGCGCCGAGGAC
ACCCTGCAGGCCCAGGGCGAGATCAGCAACGACGTGGAGGTGGTG
AAGGACCAGTTCCACACCCACGAGGGCTACATGATGGACCTGACC
GCCCACCAGGGCCGGGTGGGCAACATCCTGCAGCTGGGCAGCAAG
CTGATCGGCACCGGCAAGCTGAGCGAGGACGAGGAGACCGAGGTG
CAGGAGCAGATGAACCTGCTGAACAGCCGGTGGGAGTGCCTGCGG
GTGGCCAGCATGGAGAAGCAGAGCAACCTGCACCGGGTGCTGATG
GACCTGCAGAACCAGAAGCTGAAGGAGCTGAACGACTGGCTGACC
AAGACCGAGGAGCGGACCCGGAAGATGGAGGAGGAGCCCCTGGGC
CCCGACCTGGAGGACCTGAAGCGGCAGGTGCAGCAGCACAAGGTG
CTGCAGGAGGACCTGGAGCAGGAGCAGGTGCGGGTGAACAGCCTG
ACCCACATGGTGGTGGTGGTGGACGAGAGCAGCGGCGACCACGCC
ACCGCCGCCCTGGAGGAGCAGCTGAAGGTGCTGGGCGACCGGTGG
GCCAACATCTGCCGGTGGACCGAGGACCGGTGGGTGCTGCTGCAG
GACCGGTTCGACCGGAGCGTGGAGAAGTGGCGGCGGTTCCACTAC
GACATCAAGATCTTCAACCAGTGGCTGACCGAGGCCGAGCAGTTC
CTGCGGAAGACCCAGATCCCCGAGAACTGGGAGCACGCCAAGTAC
AAGTGGTACCTGAAGGAGCTGCAGGACGGCATCGGCCAGCGGCAG
ACCGTGGTGCGGACCCTGAACGCCACCGGCGAGGAGATCATCCAG
CAGAGCAGCAAGACCGACGCCAGCATCCTGCAGGAGAAGCTGGGC
AGCCTGAACCTGCGGTGGCAGGAGGTGTGCAAGCAGCTGAGCGAC
CGGAAGAAGCGGCTGGAGGAGCAGAAGAAGGACAGCACCCAGTGG
CTGGAGGCCAAGGAGGAGGCCGAGCAGGTGCTGGGCCAGGCCCGG
GCCAAGCTGGAGAGCTGGAAGGAGGGCCCCTACACCGTGGACGCC
ATCCAGAAGAAGATCACCGAGACCAAGCAGCTGGCCAAGGACCTG
CGGCAGTGGCAGACCAACGTGGACGTGGCCAACGACCTGGCCCTG
AAGCTGCTGCGGGACTACAGCGCCGACGACACCCGGAAGGTGCAC
ATGATCACCGAGAACATCAACGCCAGCTGGCGGAGCATCCACAAG
CGGGTGAGCGAGCGGGAGGCCGCCCTGGAGGAGACCCACCGGCTG
CTGCAGCAGTTCCCCCTGGACCTGGAGAAGTTCCTGGCCTGGCTG
ACCGAGGCCGAGACCACCGCCAACGTGCTGCAGGACGCCACCCGG
AAGGAGCGGCTGCTGGAGGACAGCAAGGGCGTGAAGGAGCTGATG
AAGCAGTGGCAGGACCTGCAGGGCGAGATCGAGGCCCACACCGAC
GTGTACCACAACCTGGACGAGAACAGCCAGAAGATCCTGCGGAGC
CTGGAGGGCAGCGACGACGCCGTGCTGCTGCAGCGGCGGCTGGAC
AACATGAACTTCAAGTGGAGCGAGCTGCGGAAGAAGAGCCTGAAC
ATCCGGAGCCACCTGGAGGCCAGCAGCGACCAGTGGAAGCGGCTG
GGCCCCGCCAGCCAGCACTTCCTGAGCACCAGCGTGCAGGGCCCC
TGGGAGCGGGCCATCAGCCCCAACAAGGTGCCCTACTACATCAAC
CACGAGACCCAGACCACCTGCTGGGACCACCCCAAGATGACCGAG
CTGTACCAGAGCCTGGCCGACCTGAACAACGTGCGGTTCAGCGCC
TACCGGACCGCCATGAAGCTGCGGCGGCTGCAGAAGGCCCTGTGC
CTGGACCTGCTGAGCCTGAGCGCCGCCTGCGACGCCCTGGACCAG
CACAACCTGAAGCAGAACGACCAGCCCATGGACATCCTGCAGATC
ATCAACTGCCTGACCACCATCTACGACCGGCTGGAGCAGGAGCAC
AACAACCTGGTGAACGTGCCCCTGTGCGTGGACATGTGCCTGAAC
TGGCTGCTGAACGTGTACGACACCGGCCGGACCGGCCGGATCCGG
GTGCTGAGCTTCAAGACCGGCATCATCAGCCTGTGCAAGGCCCAC
CTGGAGGACAAGTACCGGTACCTGTTCAAGCAGGTGGCCAGCAGC
ACCGGCTTCTGCGACCAGCGGCGGCTGGGCCTGCTGCTGCACGAC
AGCATCCAGATCCCCCGGCAGCTGGGCGAGGTGGCCAGCTTCGGC
GGCAGCAACATCGAGCCCAGCGTGCGGAGCTGCTTCCAGTTCGCC
AACAACAAGCCCGAGATCGAGGCCGCCCTGTTCCTGGACTGGATG
CGGCTGGAGCCCCAGAGCATGGTGTGGCTGCCCGTGCTGCACCGG
GTGGCCGCCGCCGAGACCGCCAAGCACCAGGCCAAGTGCAACATC
TGCAAGGAGTGCCCCATCATCGGCTTCCGGTACCGGAGCCTGAAG
CACTTCAACTACGACATCTGCCAGAGCTGCTTCTTCAGCGGCCGG
GTGGCCAAGGGCCACAAGATGCACTACCCCATGGTGGAGTACTGC
ACCCCCACCACCAGCGGCGAGGACGTGCGGGACTTCGCCAAGGTG
CTGAAGAACAAGTTCCGGACCAAGCGGTACTTCGCCAAGCACCCC
CGGATGGGCTACCTGCCCGTGCAGACCGTGCTGGAGGGCGACAAC
ATGGAGACCCCCGTGACCCTGATCAACTTCTGGCCCGTGGACAGC
GCCCCCGCCAGCAGCCCCCAGCTGAGCCACGACGACACCCACAGC
CGGATCGAGCACTACGCCAGCCGGCTGGCCGAGATGGAGAACAGC
AACGGCAGCTACCTGAACGACAGCATCAGCCCCAACGAGAGCATC
GACGACGAGCACCTGCTGATCCAGCACTACTGCCAGAGCCTGAAC
CAGGACAGCCCCCTGAGCCAGCCCCGGAGC

[0124] Non-limiting examples of amino acid sequences of chimeric utrophin/dystrophin micro-dystrophins for use in both heart and skeletal muscle are provided below. These constructs include the known syntrophin binding sites in dystrophin within repeat 17, repeat 22, and within the C-terminus prior to the coiled coil region.

UtroNterm-R2_DystroR17_H3_R22_H4-
trCterm + SynBS
(SEQ ID NO: 161)
MAKYGEHEASPDNGQNEFSDIIKSRSDEHNDVQKKTFTKWINARF
SKSGKPPINDMFTDLKDGRKLLDLLEGLTGTSLPKERGSTRVHAL
NNVNRVLQVLHQNNVELVNIGGTDIVDGNHKLTLGLLWSIILHWQ
VKDVMKDVMSDLQQTNSEKILLSWVRQTTRPYSQVNVLNFTTSWT
DGLAFNAVLHRHKPDLFSWDKVVKMSPIERLEHAFSKAQTYLGIE
KLLDPEDVAVQLPDKKSIIMYLTSLFEVLPQQVTIDAIREVETLP
RKYKKECEEEAINIQSTAPEEEHESPRAETPSTVTEVDMDLDSYQ
IALEEVLTWLLSAEDTFQEQDDISDDVEEVKDQFATHEAFMMELT
AHQSSVGSVLQAGNQLITQGTLSDEEEFEIQEQMILLNARWEALR
VESMDRQSRLHDVLMELQKKQLQQLSAWLTLTEERIQKMETCPLD
DDVKSLQKLLEEHKSLQSDLEAEQVKVNSLTHMVVIVDENSGESA
TAILEDQLQKLGERWTAVCRWTEERWNRLQEIAASARFDRSVEKW
RRFHYDIKIFNQWLTEAEQFLRKTQIPENWEHAKYKWYLKELQDG
IGQRQTVVRTLNATGEEIIQQSSKTDASILQEKLGSLNLRWQEVC
KQLSDRKKRLEEQKQPDLAPGLTTIGASPTQTVTLVTQPVVTKET
AISKLEMPSSLMLEVPEETHRLLQQFPLDLEKFLAWLTEAETTAN
VLQDATRKERLLEDSKGVKELMKQWQDLQGEIEAHTDVYHNLDEN
SQKILRSLEGSDDAVLLQRRLDNMNEKWSELRKKSLNIRSHLEAS
SDQWKRLGPASQHELSTSVQGPWERAISPNKVPYYINHETQTTCW
DHPKMTELYQSLADLNNVRFSAYRTAMKLRRLQKALCLDLLSLSA
ACDALDQHNLKQNDQPMDILQIINCLTTIYDRLEQEHNNLVNVPL
CVDMCLNWLLNVYDTGRIGRIRVLSFKTGIISLCKAHLEDKYRYL
FKQVASSTGFCDQRRLGLLLHDSIQIPRQLGEVASFGGSNIEPSV
RSCFQFANNKPEIEAALFLDWMRLEPQSMVWLPVLHRVAAAETAK
HQAKCNICKECPIIGFRYRSLKHFNYDICQSCFFSGRVAKGHKMH
YPMVEYCTPTTSGEDVRDFAKVLKNKFRTKRYFAKHPRMGYLPVQ
TVLEGDNMETPVTLINFWPVDSAPASSPQLSHDDTHSRIEHYASR
LAEMENSNGSYLNDSISPNESIDDEHLLIQHYCQSLNQDSPLSQP
RS
UtroNterm-R1_DystroR17_H3_R21-R22_
H4-trCterm + SynBS
(SEQ ID NO: 162)
MAKYGEHEASPDNGQNEFSDIIKSRSDEHNDVQKKTFTKWINARF
SKSGKPPINDMFTDLKDGRKLLDLLEGLTGTSLPKERGSTRVHAL
NNVNRVLQVLHQNNVELVNIGGTDIVDGNHKLTLGLLWSIILHWQ
VKDVMKDVMSDLQQTNSEKILLSWVRQTTRPYSQVNVLNFTTSWT
DGLAFNAVLHRHKPDLFSWDKVVKMSPIERLEHAFSKAQTYLGIE
KLLDPEDVAVQLPDKKSIIMYLTSLFEVLPQQVTIDAIREVETLP
RKYKKECEEEAINIQSTAPEEEHESPRAETPSTVTEVDMDLDSYQ
IALEEVLTWLLSAEDTFQEQDDISDDVEEVKDQFATHEAFMMELT
AHQSSVGSVLQAGNQLITQGTLSDEEEFEIQEQMTLLNARWEALR
VESMDRQSRLHDVLMAASARFDRSVEKWRRFHYDIKIFNQWLTEA
EQFLRKTQIPENWEHAKYKWYLKELQDGIGQRQTVVRTLNATGEE
IIQQSSKTDASILQEKLGSLNLRWQEVCKQLSDRKKRLEEQKQPD
LAPGLTTIGASPTQTVTLVTQPVVTKETAISKLEMPSSLMLEVPK
DSTQWLEAKEEAEQVLGQARAKLESWKEGPYTVDAIQKKITETKQ
LAKDLRQWQTNVDVANDLALKLLRDYSADDTRKVHMITENINASW
RSIHKRVSEREAALEETHRLLQQFPLDLEKFLAWLTEAETTANVL
QDATRKERLLEDSKGVKELMKQWQDLQGEIEAHTDVYHNLDENSQ
KILRSLEGSDDAVLLQRRLDNMNFKWSELRKKSLNIRSHLEASSD
QWKRLGPASQHELSTSVQGPWERAISPNKVPYYINHETQTTCWDH
PKMTELYQSLADLNNVRESAYRTAMKLRRLQKALCLDLLSLSAAC
DALDQHNLKQNDQPMDILQIINCLTTIYDRLEQEHNNLVNVPLCV
DMCLNWLLNVYDTGRIGRIRVLSFKTGIISLCKAHLEDKYRYLFK
QVASSTGFCDQRRLGLLLHDSIQIPRQLGEVASEGGSNIEPSVRS
CFQFANNKPEIEAALFLDWMRLEPQSMVWLPVLHRVAAAETAKHQ
AKCNICKECPIIGFRYRSLKHFNYDICQSCFFSGRVAKGHKMHYP
MVEYCTPTTSGEDVRDFAKVLKNKFRTKRYFAKHPRMGYLPVQTV
LEGDNMETPVTLINFWPVDSAPASSPQLSHDDTHSRIEHYASRLA
EMENSNGSYLNDSISPNESIDDEHLLIQHYCQSLNQDSPLSQPRS
UtroNterm-R2_DystroR17_H3_R22_H4-
trCterm + SynBS_coiled coil
(SEQ ID NO: 163)
MAKYGEHEASPDNGQNEFSDIIKSRSDEHNDVQKKTFTKWINARF
SKSGKPPINDMFTDLKDGRKLLDLLEGLTGTSLPKERGSTRVHAL
NNVNRVLQVLHQNNVELVNIGGTDIVDGNHKLTLGLLWSIILHWQ
VKDVMKDVMSDLQQTNSEKILLSWVRQTTRPYSQVNVLNFTTSWT
DGLAFNAVLHRHKPDLFSWDKVVKMSPIERLEHAFSKAQTYLGIE
KLLDPEDVAVQLPDKKSIIMYLTSLFEVLPQQVTIDAIREVETLP
RKYKKECEEEAINIQSTAPEEEHESPRAETPSTVTEVDMDLDSYQ
IALEEVLTWLLSAEDTFQEQDDISDDVEEVKDQFATHEAFMMELT
AHQSSVGSVLQAGNQLITQGTLSDEEEFEIQEQMTLLNARWEALR
VESMDRQSRLHDVLMELQKKQLQQLSAWLTLTEERIQKMETCPLD
DDVKSLQKLLEEHKSLQSDLEAEQVKVNSLTHMVVIVDENSGESA
TAILEDQLQKLGERWTAVCRWTEERWNRLQEIAASARFDRSVEKW
RRFHYDIKIFNQWLTEAEQFLRKTQIPENWEHAKYKWYLKELQDG
IGQRQTVVRTLNATGEEIIQQSSKTDASILQEKLGSLNLRWQEVC
KQLSDRKKRLEEQKQPDLAPGLTTIGASPTQTVTLVTQPVVTKET
AISKLEMPSSLMLEVPEETHRLLQQFPLDLEKFLAWLTEAETTAN
VLQDATRKERLLEDSKGVKELMKQWQDLQGEIEAHTDVYHNLDEN
SQKILRSLEGSDDAVLLQRRLDNMNFKWSELRKKSLNIRSHLEAS
SDQWKRLGPASQHELSTSVQGPWERAISPNKVPYYINHETQTTCW
DHPKMTELYQSLADLNNVRESAYRTAMKLRRLQKALCLDLLSLSA
ACDALDQHNLKQNDQPMDILQIINCLTTIYDRLEQEHNNLVNVPL
CVDMCLNWLLNVYDTGRIGRIRVLSFKTGIISLCKAHLEDKYRYL
FKQVASSTGFCDQRRLGLLLHDSIQIPRQLGEVASFGGSNIEPSV
RSCFQFANNKPEIEAALFLDWMRLEPQSMVWLPVLHRVAAAETAK
HQAKCNICKECPIIGFRYRSLKHFNYDICQSCFFSGRVAKGHKMH
YPMVEYCTPTTSGEDVRDFAKVLKNKFRTKRYFAKHPRMGYLPVQ
TVLEGDNMETPVTLINFWPVDSAPASSPQLSHDDTHSRIEHYASR
LAEMENSNGSYLNDSISPNESIDDEHLLIQHYCQSLNQDSPLSQP
RSPAQILISLESEERGELERILADLEEENRNLQAEYDRLKQQHEH
KGLSPLPSPPEMMPTSPQSP
UtroNterm-R1_DystroR17_H3_R21-R22_H4-
trCterm + SynBS_coiled coil
(SEQ ID NO: 164)
MAKYGEHEASPDNGQNEFSDIIKSRSDEHNDVQKKTFTKWINARF
SKSGKPPINDMFTDLKDGRKLLDLLEGLTGTSLPKERGSTRVHAL
NNVNRVLQVLHQNNVELVNIGGTDIVDGNHKLTLGLLWSIILHWQ
VKDVMKDVMSDLQQTNSEKILLSWVRQTTRPYSQVNVLNFTTSWT
DGLAFNAVLHRHKPDLFSWDKVVKMSPIERLEHAFSKAQTYLGIE
KLLDPEDVAVQLPDKKSIIMYLTSLFEVLPQQVTIDAIREVETLP
RKYKKECEEEAINIQSTAPEEEHESPRAETPSTVTEVDMDLDSYQ
IALEEVLTWLLSAEDTFQEQDDISDDVEEVKDQFATHEAFMMELT
AHQSSVGSVLQAGNQLITQGTLSDEEEFEIQEQMTLLNARWEALR
VESMDRQSRLHDVLMAASARFDRSVEKWRRFHYDIKIFNQWLTEA
EQFLRKTQIPENWEHAKYKWYLKELQDGIGQRQTVVRTLNATGEE
IIQQSSKTDASILQEKLGSLNLRWQEVCKQLSDRKKRLEEQKQPD
LAPGLITIGASPTQTVTLVTQPVVTKETAISKLEMPSSLMLEVPK
DSTQWLEAKEEAEQVLGQARAKLESWKEGPYTVDAIQKKITETKQ
LAKDLRQWQTNVDVANDLALKLLRDYSADDTRKVHMITENINASW
RSIHKRVSEREAALEETHRLLQQFPLDLEKFLAWLTEAETTANVL
QDATRKERLLEDSKGVKELMKQWQDLQGEIEAHTDVYHNLDENSQ
KILRSLEGSDDAVLLQRRLDNMNFKWSELRKKSLNIRSHLEASSD
QWKRLGPASQHELSTSVQGPWERAISPNKVPYYINHETQTTCWDH
PKMTELYQSLADLNNVRFSAYRTAMKLRRLQKALCLDLLSLSAAC
DALDQHNLKQNDQPMDILQIINCLITIYDRLEQEHNNLVNVPLCV
DMCLNWLLNVYDTGRIGRIRVLSFKTGIISLCKAHLEDKYRYLFK
QVASSTGFCDQRRLGLLLHDSIQIPRQLGEVASFGGSNIEPSVRS
CFQFANNKPEIEAALFLDWMRLEPQSMVWLPVLHRVAAAETAKHQ
AKCNICKECPIIGFRYRSLKHFNYDICQSCFFSGRVAKGHKMHYP
MVEYCTPTTSGEDVRDFAKVLKNKFRTKRYFAKHPRMGYLPVQTV
LEGDNMETPVTLINFWPVDSAPASSPQLSHDDTHSRIEHYASRLA
EMENSNGSYLNDSISPNESIDDEHLLIQHYCQSLNQDSPLSQPRS
PAQILISLESEERGELERILADLEEENRNLQAEYDRLKQQHEHKG
LSPLPSPPEMMPTSPQSP
UtroNterm-R2_DystroR17_ R21-R22_H4-
trCterm + SynBS
(SEQ ID NO: 165)
MAKYGEHEASPDNGQNEFSDIIKSRSDEHNDVQKKTFTKWINARF
SKSGKPPINDMFTDLKDGRKLLDLLEGLTGTSLPKERGSTRVHAL
NNVNRVLQVLHQNNVELVNIGGTDIVDGNHKLTLGLLWSIILHWQ
VKDVMKDVMSDLQQTNSEKILLSWVRQTTRPYSQVNVLNFTTSWT
DGLAFNAVLHRHKPDLFSWDKVVKMSPIERLEHAFSKAQTYLGIE
KLLDPEDVAVQLPDKKSIIMYLTSLFEVLPQQVTIDAIREVETLP
RKYKKECEEEAINIQSTAPEEEHESPRAETPSTVTEVDMDLDSYQ
IALEEVLTWLLSAEDTFQEQDDISDDVEEVKDQFATHEAFMMELT
AHQSSVGSVLQAGNQLITQGTLSDEEEFEIQEQMTLLNARWEALR
VESMDRQSRLHDVLMELQKKQLQQLSAWLTLTEERIQKMETCPLD
DDVKSLQKLLEEHKSLQSDLEAEQVKVNSLTHMVVIVDENSGESA
TAILEDQLQKLGERWTAVCRWTEERWNRLQEIAASARFDRSVEKW
RRFHYDIKIFNQWLTEAEQFLRKTQIPENWEHAKYKWYLKELQDG
IGQRQTVVRTLNATGEEIIQQSSKTDASILQEKLGSLNLRWQEVC
KQLSDRKKRLEEQKKDSTQWLEAKEEAEQVLGQARAKLESWKEGP
YTVDAIQKKITETKQLAKDLRQWQTNVDVANDLALKLLRDYSADD
TRKVHMITENINASWRSIHKRVSEREAALEETHRLLQQFPLDLEK
FLAWLTEAETTANVLQDATRKERLLEDSKGVKELMKQWQDLQGEI
EAHTDVYHNLDENSQKILRSLEGSDDAVLLQRRLDNMNFKWSELR
KKSLNIRSHLEASSDQWKRLGPASQHELSTSVQGPWERAISPNKV
PYYINHETQTTCWDHPKMTELYQSLADLNNVRFSAYRTAMKLRRL
QKALCLDLLSLSAACDALDQHNLKQNDQPMDILQIINCLTTIYDR
LEQEHNNLVNVPLCVDMCLNWLLNVYDTGRIGRIRVLSFKTGIIS
LCKAHLEDKYRYLFKQVASSTGFCDQRRLGLLLHDSIQIPRQLGE
VASFGGSNIEPSVRSCFQFANNKPEIEAALFLDWMRLEPQSMVWL
PVLHRVAAAETAKHQAKCNICKECPIIGFRYRSLKHFNYDICQSC
FFSGRVAKGHKMHYPMVEYCTPTTSGEDVRDFAKVLKNKFRTKRY
FAKHPRMGYLPVQTVLEGDNMETPVTLINFWPVDSAPASSPQLSH
DDTHSRIEHYASRLAEMENSNGSYLNDSISPNESIDDEHLLIQHY
CQSLNQDSPLSQPRS

[0125] Non-limiting examples of nucleotide sequences encoding chimeric utrophin/dystrophin micro-dystrophins for use in both heart and skeletal muscle are provided below.

UtrophinNterm-R2_DystrophinR17_H3_R22_
H4-trCterm + SynBS
Human sequence without codon alterations:
(SEQ ID NO: 176)
ATGGCCAAGTATGGAGAACATGAAGCCAGTCCTGACAATGGGCAG
AACGAATTCAGTGATATCATTAAGTCCAGATCTGATGAACACAAT
GACGTACAGAAGAAAACCTTTACCAAATGGATAAATGCTCGATTT
TCAAAGAGTGGGAAACCACCCATCAATGATATGTTCACAGACCTC
AAAGATGGAAGGAAGCTATTGGATCTTCTAGAAGGCCTCACAGGA
ACATCACTGCCAAAGGAACGTGGTTCCACAAGGGTACATGCCTTA
AATAACGTCAACAGAGTGCTGCAGGTTTTACATCAGAACAATGTG
GAATTAGTGAATATAGGGGGAACTGACATTGTGGATGGAAATCAC
AAACTGACTTTGGGGTTACTTTGGAGCATCATTTTGCACTGGCAG
GTGAAAGATGTCATGAAGGATGTCATGTCGGACCTGCAGCAGACG
AACAGTGAGAAGATCCTGCTCAGCTGGGTGCGTCAGACCACCAGG
CCCTACAGCCAAGTCAACGTCCTCAACTTCACCACCAGCTGGACA
GATGGACTCGCCTTTAATGCTGTCCTCCACCGACATAAACCTGAT
CTCTTCAGCTGGGATAAAGTTGTCAAAATGTCACCAATTGAGAGA
CTTGAACATGCCTTCAGCAAGGCTCAAACTTATTTGGGAATTGAA
AAGCTGTTAGATCCTGAAGATGTTGCCGTTCAGCTTCCTGACAAG
AAATCCATAATTATGTATTTAACATCTTTGTTTGAGGTGCTACCT
CAGCAAGTCACCATAGACGCCATCCGTGAGGTAGAGACACTCCCA
AGGAAATATAAAAAAGAATGTGAAGAAGAGGCAATTAATATACAG
AGTACAGCGCCTGAGGAGGAGCATGAGAGTCCCCGAGCTGAAACT
CCCAGCACTGTCACTGAGGTTGACATGGATCTGGACAGCTATCAG
ATTGCGTTGGAGGAAGTGCTGACCTGGTTGCTTTCTGCTGAGGAC
ACTTTCCAGGAGCAGGATGATATTTCTGATGATGTTGAAGAAGTC
AAAGACCAGTTTGCAACCCATGAAGCTTTTATGATGGAACTGACT
GCACACCAGAGCAGTGTGGGCAGCGTCCTGCAGGCAGGCAACCAA
CTGATAACACAAGGAACTCTGTCAGACGAAGAAGAATTTGAGATT
CAGGAACAGATGACCCTGCTGAATGCTAGATGGGAGGCTCTTAGG
GTGGAGAGTATGGACAGACAGTCCCGGCTGCACGATGTGCTGATG
GAACTGCAGAAGAAGCAACTGCAGCAGCTCTCCGCCTGGTTAACA
CTCACAGAGGAGCGCATTCAGAAGATGGAAACTTGCCCCCTGGAT
GATGATGTAAAATCTCTACAAAAGCTGCTAGAAGAACATAAAAGT
TTGCAAAGTGATCTTGAGGCTGAACAGGTGAAAGTAAATTCACTA
ACTCACATGGTGGTCATTGTTGATGAAAACAGTGGTGAGAGTGCT
ACAGCTATCCTAGAAGACCAGTTACAGAAACTTGGTGAGCGCTGG
ACAGCAGTATGCCGTTGGACTGAAGAACGCTGGAATAGGTTACAA
GAAATCGCCGCTAGCGCCCGATTTGACAGATCTGTTGAGAAATGG
CGGCGTTTTCATTATGATATAAAGATATTTAATCAGTGGCTAACA
GAAGCTGAACAGTTTCTCAGAAAGACACAAATTCCTGAGAATTGG
GAACATGCTAAATACAAATGGTATCTTAAGGAACTCCAGGATGGC
ATTGGGCAGCGGCAAACTGTTGTCAGAACATTGAATGCAACTGGG
GAAGAAATAATTCAGCAATCCTCAAAAACAGATGCCAGTATTCTA
CAGGAAAAATTGGGAAGCCTGAATCTGCGGTGGCAGGAGGTCTGC
AAACAGCTGTCAGACAGAAAAAAGAGGCTAGAAGAACAAAAGCAG
CCTGACCTAGCTCCTGGACTGACCACTATTGGAGCCTCTCCTACT
CAGACTGTTACTCTGGTGACACAACCTGTGGTTACTAAGGAAACT
GCCATCTCCAAACTAGAAATGCCATCTTCCTTGATGTTGGAGGTA
CCTGAAGAAACTCATAGATTACTGCAACAGTTCCCCCTGGACCTG
GAAAAGTTTCTTGCCTGGCTTACAGAAGCTGAAACAACTGCCAAT
GTCCTACAGGATGCTACCCGTAAGGAAAGGCTCCTAGAAGACTCC
AAGGGAGTAAAAGAGCTGATGAAACAATGGCAAGACCTCCAAGGT
GAAATTGAAGCTCACACAGATGTTTATCACAACCTGGATGAAAAC
AGCCAAAAAATCCTGAGATCCCTGGAAGGTTCCGATGATGCAGTC
CTGTTACAAAGACGTTTGGATAACATGAACTTCAAGTGGAGTGAA
CTTCGGAAAAAGTCTCTCAACATTAGGTCCCATTTGGAAGCCAGT
TCTGACCAGTGGAAGCGTCTGGGTCCAGCATCTCAGCACTTTCTT
TCCACGTCTGTCCAGGGTCCCTGGGAGAGAGCCATCTCGCCAAAC
AAAGTGCCCTACTATATCAACCACGAGACTCAAACAACTTGCTGG
GACCATCCCAAAATGACAGAGCTCTACCAGTCTTTAGCTGACCTG
AATAATGTCAGATTCTCAGCTTATAGGACTGCCATGAAACTCCGA
AGACTGCAGAAGGCCCTTTGCTTGGATCTCTTGAGCCTGTCAGCT
GCATGTGATGCCTTGGACCAGCACAACCTCAAGCAAAATGACCAG
CCCATGGATATCCTGCAGATTATTAATTGTTTGACCACTATTTAT
GACCGCCTGGAGCAAGAGCACAACAATTTGGTCAACGTCCCTCTC
TGCGTGGATATGTGTCTGAACTGGCTGCTGAATGTTTATGATACG
GGACGAACAGGGAGGATCCGTGTCCTGTCTTTTAAAACTGGCATC
ATTTCCCTGTGTAAAGCACATTTGGAAGACAAGTACAGATACCTT
TTCAAGCAAGTGGCAAGTTCAACAGGATTTTGTGACCAGCGCAGG
CTGGGCCTCCTTCTGCATGATTCTATCCAAATTCCAAGACAGTTG
GGTGAAGTTGCATCCTTTGGGGGCAGTAACATTGAGCCAAGTGTC
CGGAGCTGCTTCCAATTTGCTAATAATAAGCCAGAGATCGAAGCG
GCCCTCTTCCTAGACTGGATGAGACTGGAACCCCAGTCCATGGTG
TGGCTGCCCGTCCTGCACAGAGTGGCTGCTGCAGAAACTGCCAAG
CATCAGGCCAAATGTAACATCTGCAAAGAGTGTCCAATCATTGGA
TTCAGGTACAGGAGTCTAAAGCACTTTAATTATGACATCTGCCAA
AGCTGCTTTTTTTCTGGTCGAGTTGCAAAAGGCCATAAAATGCAC
TATCCCATGGTGGAATATTGCACTCCGACTACATCAGGAGAAGAT
GTTCGAGACTTTGCCAAGGTACTAAAAAACAAATTTCGAACCAAA
AGGTATTTTGCGAAGCATCCCCGAATGGGCTACCTGCCAGTGCAG
ACTGTCTTAGAGGGGGACAACATGGAAACTCCCGTTACTCTGATC
AACTTCTGGCCAGTAGATTCTGCGCCTGCCTCGTCCCCTCAGCTT
TCACACGATGATACTCATTCACGCATTGAACATTATGCTAGCAGG
CTAGCAGAAATGGAAAACAGCAATGGATCTTATCTAAATGATAGC
ATCTCTCCTAATGAGAGCATAGATGATGAACATTTGTTAATCCAG
CATTACTGCCAAAGTTTGAACCAGGACTCCCCCCTGAGCCAGCCT
CGTAGT
Human sequence with codon optimization:
(SEQ ID NO: 177)
ATGGCCAAGTACGGCGAGCACGAGGCCAGCCCCGACAACGGCCAG
AACGAGTTCAGCGACATCATCAAGAGCCGGAGCGACGAGCACAAC
GACGTGCAGAAGAAGACCTTCACCAAGTGGATCAACGCCCGGTTC
AGCAAGAGCGGCAAGCCCCCCATCAACGACATGTTCACCGACCTG
AAGGACGGCCGGAAGCTGCTGGACCTGCTGGAGGGCCTGACCGGC
ACCAGCCTGCCCAAGGAGCGGGGCAGCACCCGGGTGCACGCCCTG
AACAACGTGAACCGGGTGCTGCAGGTGCTGCACCAGAACAACGTG
GAGCTGGTGAACATCGGCGGCACCGACATCGTGGACGGCAACCAC
AAGCTGACCCTGGGCCTGCTGTGGAGCATCATCCTGCACTGGCAG
GTGAAGGACGTGATGAAGGACGTGATGAGCGACCTGCAGCAGACC
AACAGCGAGAAGATCCTGCTGAGCTGGGTGCGGCAGACCACCCGG
CCCTACAGCCAGGTGAACGTGCTGAACTTCACCACCAGCTGGACC
GACGGCCTGGCCTTCAACGCCGTGCTGCACCGGCACAAGCCCGAC
CTGTTCAGCTGGGACAAGGTGGTGAAGATGAGCCCCATCGAGCGG
CTGGAGCACGCCTTCAGCAAGGCCCAGACCTACCTGGGCATCGAG
AAGCTGCTGGACCCCGAGGACGTGGCCGTGCAGCTGCCCGACAAG
AAGAGCATCATCATGTACCTGACCAGCCTGTTCGAGGTGCTGCCC
CAGCAGGTGACCATCGACGCCATCCGGGAGGTGGAGACCCTGCCC
CGGAAGTACAAGAAGGAGTGCGAGGAGGAGGCCATCAACATCCAG
AGCACCGCCCCCGAGGAGGAGCACGAGAGCCCCCGGGCCGAGACC
CCCAGCACCGTGACCGAGGTGGACATGGACCTGGACAGCTACCAG
ATCGCCCTGGAGGAGGTGCTGACCTGGCTGCTGAGCGCCGAGGAC
ACCTTCCAGGAGCAGGACGACATCAGCGACGACGTGGAGGAGGTG
AAGGACCAGTTCGCCACCCACGAGGCCTTCATGATGGAGCTGACC
GCCCACCAGAGCAGCGTGGGCAGCGTGCTGCAGGCCGGCAACCAG
CTGATCACCCAGGGCACCCTGAGCGACGAGGAGGAGTTCGAGATC
CAGGAGCAGATGACCCTGCTGAACGCCCGGTGGGAGGCCCTGCGG
GTGGAGAGCATGGACCGGCAGAGCCGGCTGCACGACGTGCTGATG
GAGCTGCAGAAGAAGCAGCTGCAGCAGCTGAGCGCCTGGCTGACC
CTGACCGAGGAGCGGATCCAGAAGATGGAGACCTGCCCCCTGGAC
GACGACGTGAAGAGCCTGCAGAAGCTGCTGGAGGAGCACAAGAGC
CTGCAGAGCGACCTGGAGGCCGAGCAGGTGAAGGTGAACAGCCTG
ACCCACATGGTGGTGATCGTGGACGAGAACAGCGGCGAGAGCGCC
ACCGCCATCCTGGAGGACCAGCTGCAGAAGCTGGGCGAGCGGTGG
ACCGCCGTGTGCCGGTGGACCGAGGAGCGGTGGAACCGGCTGCAG
GAGATCGCCGCTAGCGCCCGGTTCGACCGGAGCGTGGAGAAGTGG
CGGCGGTTCCACTACGACATCAAGATCTTCAACCAGTGGCTGACC
GAGGCCGAGCAGTTCCTGCGGAAGACCCAGATCCCCGAGAACTGG
GAGCACGCCAAGTACAAGTGGTACCTGAAGGAGCTGCAGGACGGC
ATCGGCCAGCGGCAGACCGTGGTGCGGACCCTGAACGCCACCGGC
GAGGAGATCATCCAGCAGAGCAGCAAGACCGACGCCAGCATCCTG
CAGGAGAAGCTGGGCAGCCTGAACCTGCGGTGGCAGGAGGTGTGC
AAGCAGCTGAGCGACCGGAAGAAGCGGCTGGAGGAGCAGAAGCAG
CCCGACCTGGCCCCCGGCCTGACCACCATCGGCGCCAGCCCCACC
CAGACCGTGACCCTGGTGACCCAGCCCGTGGTGACCAAGGAGACC
GCCATCAGCAAGCTGGAGATGCCCAGCAGCCTGATGCTGGAGGTG
CCCGAGGAGACCCACCGGCTGCTGCAGCAGTTCCCCCTGGACCTG
GAGAAGTTCCTGGCCTGGCTGACCGAGGCCGAGACCACCGCCAAC
GTGCTGCAGGACGCCACCCGGAAGGAGCGGCTGCTGGAGGACAGC
AAGGGCGTGAAGGAGCTGATGAAGCAGTGGCAGGACCTGCAGGGC
GAGATCGAGGCCCACACCGACGTGTACCACAACCTGGACGAGAAC
AGCCAGAAGATCCTGCGGAGCCTGGAGGGCAGCGACGACGCCGTG
CTGCTGCAGCGGCGGCTGGACAACATGAACTTCAAGTGGAGCGAG
CTGCGGAAGAAGAGCCTGAACATCCGGAGCCACCTGGAGGCCAGC
AGCGACCAGTGGAAGCGGCTGGGCCCCGCCAGCCAGCACTTCCTG
AGCACCAGCGTGCAGGGCCCCTGGGAGCGGGCCATCAGCCCCAAC
AAGGTGCCCTACTACATCAACCACGAGACCCAGACCACCTGCTGG
GACCACCCCAAGATGACCGAGCTGTACCAGAGCCTGGCCGACCTG
AACAACGTGCGGTTCAGCGCCTACCGGACCGCCATGAAGCTGCGG
CGGCTGCAGAAGGCCCTGTGCCTGGACCTGCTGAGCCTGAGCGCC
GCCTGCGACGCCCTGGACCAGCACAACCTGAAGCAGAACGACCAG
CCCATGGACATCCTGCAGATCATCAACTGCCTGACCACCATCTAC
GACCGGCTGGAGCAGGAGCACAACAACCTGGTGAACGTGCCCCTG
TGCGTGGACATGTGCCTGAACTGGCTGCTGAACGTGTACGACACC
GGCCGGACCGGCCGGATCCGGGTGCTGAGCTTCAAGACCGGCATC
ATCAGCCTGTGCAAGGCCCACCTGGAGGACAAGTACCGGTACCTG
TTCAAGCAGGTGGCCAGCAGCACCGGCTTCTGCGACCAGCGGCGG
CTGGGCCTGCTGCTGCACGACAGCATCCAGATCCCCCGGCAGCTG
GGCGAGGTGGCCAGCTTCGGCGGCAGCAACATCGAGCCCAGCGTG
CGGAGCTGCTTCCAGTTCGCCAACAACAAGCCCGAGATCGAGGCC
GCCCTGTTCCTGGACTGGATGCGGCTGGAGCCCCAGAGCATGGTG
TGGCTGCCCGTGCTGCACCGGGTGGCCGCCGCCGAGACCGCCAAG
CACCAGGCCAAGTGCAACATCTGCAAGGAGTGCCCCATCATCGGC
TTCCGGTACCGGAGCCTGAAGCACTTCAACTACGACATCTGCCAG
AGCTGCTTCTTCAGCGGCCGGGTGGCCAAGGGCCACAAGATGCAC
TACCCCATGGTGGAGTACTGCACCCCCACCACCAGCGGCGAGGAC
GTGCGGGACTTCGCCAAGGTGCTGAAGAACAAGTTCCGGACCAAG
CGGTACTTCGCCAAGCACCCCCGGATGGGCTACCTGCCCGTGCAG
ACCGTGCTGGAGGGCGACAACATGGAGACCCCCGTGACCCTGATC
AACTTCTGGCCCGTGGACAGCGCCCCCGCCAGCAGCCCCCAGCTG
AGCCACGACGACACCCACAGCCGGATCGAGCACTACGCCAGCCGG
CTGGCCGAGATGGAGAACAGCAACGGCAGCTACCTGAACGACAGC
ATCAGCCCCAACGAGAGCATCGACGACGAGCACCTGCTGATCCAG
CACTACTGCCAGAGCCTGAACCAGGACAGCCCCCTGAGCCAGCCC
CGGAGC
UtrophinNterm-R1_DystrophinR17_H3_R21-
R22_H4-trCterm + SynBS
Human sequence without codon alterations:
(SEQ ID NO: 178)
ATGGCCAAGTATGGAGAACATGAAGCCAGTCCTGACAATGGGCAG
AACGAATTCAGTGATATCATTAAGTCCAGATCTGATGAACACAAT
GACGTACAGAAGAAAACCTTTACCAAATGGATAAATGCTCGATTT
TCAAAGAGTGGGAAACCACCCATCAATGATATGTTCACAGACCTC
AAAGATGGAAGGAAGCTATTGGATCTTCTAGAAGGCCTCACAGGA
ACATCACTGCCAAAGGAACGTGGTTCCACAAGGGTACATGCCTTA
AATAACGTCAACAGAGTGCTGCAGGTTTTACATCAGAACAATGTG
GAATTAGTGAATATAGGGGGAACTGACATTGTGGATGGAAATCAC
AAACTGACTTTGGGGTTACTTTGGAGCATCATTTTGCACTGGCAG
GTGAAAGATGTCATGAAGGATGTCATGTCGGACCTGCAGCAGACG
AACAGTGAGAAGATCCTGCTCAGCTGGGTGCGTCAGACCACCAGG
CCCTACAGCCAAGTCAACGTCCTCAACTTCACCACCAGCTGGACA
GATGGACTCGCCTTTAATGCTGTCCTCCACCGACATAAACCTGAT
CTCTTCAGCTGGGATAAAGTTGTCAAAATGTCACCAATTGAGAGA
CTTGAACATGCCTTCAGCAAGGCTCAAACTTATTTGGGAATTGAA
AAGCTGTTAGATCCTGAAGATGTTGCCGTTCAGCTTCCTGACAAG
AAATCCATAATTATGTATTTAACATCTTTGTTTGAGGTGCTACCT
CAGCAAGTCACCATAGACGCCATCCGTGAGGTAGAGACACTCCCA
AGGAAATATAAAAAAGAATGTGAAGAAGAGGCAATTAATATACAG
AGTACAGCGCCTGAGGAGGAGCATGAGAGTCCCCGAGCTGAAACT
CCCAGCACTGTCACTGAGGTTGACATGGATCTGGACAGCTATCAG
ATTGCGTTGGAGGAAGTGCTGACCTGGTTGCTTTCTGCTGAGGAC
ACTTTCCAGGAGCAGGATGATATTTCTGATGATGTTGAAGAAGTC
AAAGACCAGTTTGCAACCCATGAAGCTTTTATGATGGAACTGACT
GCACACCAGAGCAGTGTGGGCAGCGTCCTGCAGGCAGGCAACCAA
CTGATAACACAAGGAACTCTGTCAGACGAAGAAGAATTTGAGATT
CAGGAACAGATGACCCTGCTGAATGCTAGATGGGAGGCTCTTAGG
GTGGAGAGTATGGACAGACAGTCCCGGCTGCACGATGTGCTGATG
GCCGCTAGCGCCCGATTTGACAGATCTGTTGAGAAATGGCGGCGT
TTTCATTATGATATAAAGATATTTAATCAGTGGCTAACAGAAGCT
GAACAGTTTCTCAGAAAGACACAAATTCCTGAGAATTGGGAACAT
GCTAAATACAAATGGTATCTTAAGGAACTCCAGGATGGCATTGGG
CAGCGGCAAACTGTTGTCAGAACATTGAATGCAACTGGGGAAGAA
ATAATTCAGCAATCCTCAAAAACAGATGCCAGTATTCTACAGGAA
AAATTGGGAAGCCTGAATCTGCGGTGGCAGGAGGTCTGCAAACAG
CTGTCAGACAGAAAAAAGAGGCTAGAAGAACAAAAGCAGCCTGAC
CTAGCTCCTGGACTGACCACTATTGGAGCCTCTCCTACTCAGACT
GTTACTCTGGTGACACAACCTGTGGTTACTAAGGAAACTGCCATC
TCCAAACTAGAAATGCCATCTTCCTTGATGTTGGAGGTACCTAAG
GATTCAACACAATGGCTGGAAGCTAAGGAAGAAGCTGAGCAGGTC
TTAGGACAGGCCAGAGCCAAGCTTGAGTCATGGAAGGAGGGTCCC
TATACAGTAGATGCAATCCAAAAGAAAATCACAGAAACCAAGCAG
TTGGCCAAAGACCTCCGCCAGTGGCAGACAAATGTAGATGTGGCA
AATGACTTGGCCCTGAAACTTCTCCGGGATTATTCTGCAGATGAT
ACCAGAAAAGTCCACATGATAACAGAGAATATCAATGCCTCTTGG
AGAAGCATTCATAAAAGGGTGAGTGAGCGAGAGGCTGCTTTGGAA
GAAACTCATAGATTACTGCAACAGTTCCCCCTGGACCTGGAAAAG
TTTCTTGCCTGGCTTACAGAAGCTGAAACAACTGCCAATGTCCTA
CAGGATGCTACCCGTAAGGAAAGGCTCCTAGAAGACTCCAAGGGA
GTAAAAGAGCTGATGAAACAATGGCAAGACCTCCAAGGTGAAATT
GAAGCTCACACAGATGTTTATCACAACCTGGATGAAAACAGCCAA
AAAATCCTGAGATCCCTGGAAGGTTCCGATGATGCAGTCCTGTTA
CAAAGACGTTTGGATAACATGAACTTCAAGTGGAGTGAACTTCGG
AAAAAGTCTCTCAACATTAGGTCCCATTTGGAAGCCAGTTCTGAC
CAGTGGAAGCGTCTGGGTCCAGCATCTCAGCACTTTCTTTCCACG
TCTGTCCAGGGTCCCTGGGAGAGAGCCATCTCGCCAAACAAAGTG
CCCTACTATATCAACCACGAGACTCAAACAACTTGCTGGGACCAT
CCCAAAATGACAGAGCTCTACCAGTCTTTAGCTGACCTGAATAAT
GTCAGATTCTCAGCTTATAGGACTGCCATGAAACTCCGAAGACTG
CAGAAGGCCCTTTGCTTGGATCTCTTGAGCCTGTCAGCTGCATGT
GATGCCTTGGACCAGCACAACCTCAAGCAAAATGACCAGCCCATG
GATATCCTGCAGATTATTAATTGTTTGACCACTATTTATGACCGC
CTGGAGCAAGAGCACAACAATTTGGTCAACGTCCCTCTCTGCGTG
GATATGTGTCTGAACTGGCTGCTGAATGTTTATGATACGGGACGA
ACAGGGAGGATCCGTGTCCTGTCTTTTAAAACTGGCATCATTTCC
CTGTGTAAAGCACATTTGGAAGACAAGTACAGATACCTTTTCAAG
CAAGTGGCAAGTTCAACAGGATTTTGTGACCAGCGCAGGCTGGGC
CTCCTTCTGCATGATTCTATCCAAATTCCAAGACAGTTGGGTGAA
GTTGCATCCTTTGGGGGCAGTAACATTGAGCCAAGTGTCCGGAGC
TGCTTCCAATTTGCTAATAATAAGCCAGAGATCGAAGCGGCCCTC
TTCCTAGACTGGATGAGACTGGAACCCCAGTCCATGGTGTGGCTG
CCCGTCCTGCACAGAGTGGCTGCTGCAGAAACTGCCAAGCATCAG
GCCAAATGTAACATCTGCAAAGAGTGTCCAATCATTGGATTCAGG
TACAGGAGTCTAAAGCACTTTAATTATGACATCTGCCAAAGCTGC
TTTTTTTCTGGTCGAGTTGCAAAAGGCCATAAAATGCACTATCCC
ATGGTGGAATATTGCACTCCGACTACATCAGGAGAAGATGTTCGA
GACTTTGCCAAGGTACTAAAAAACAAATTTCGAACCAAAAGGTAT
TTTGCGAAGCATCCCCGAATGGGCTACCTGCCAGTGCAGACTGTC
TTAGAGGGGGACAACATGGAAACTCCCGTTACTCTGATCAACTTC
TGGCCAGTAGATTCTGCGCCTGCCTCGTCCCCTCAGCTTTCACAC
GATGATACTCATTCACGCATTGAACATTATGCTAGCAGGCTAGCA
GAAATGGAAAACAGCAATGGATCTTATCTAAATGATAGCATCTCT
CCTAATGAGAGCATAGATGATGAACATTTGTTAATCCAGCATTAC
TGCCAAAGTTTGAACCAGGACTCCCCCCTGAGCCAGCCTCGTAGT
Human sequence with codon optimization:
(SEQ ID NO: 179)
ATGGCCAAGTACGGCGAGCACGAGGCCAGCCCCGACAACGGCCAG
AACGAGTTCAGCGACATCATCAAGAGCCGGAGCGACGAGCACAAC
GACGTGCAGAAGAAGACCTTCACCAAGTGGATCAACGCCCGGTTC
AGCAAGAGCGGCAAGCCCCCCATCAACGACATGTTCACCGACCTG
AAGGACGGCCGGAAGCTGCTGGACCTGCTGGAGGGCCTGACCGGC
ACCAGCCTGCCCAAGGAGCGGGGCAGCACCCGGGTGCACGCCCTG
AACAACGTGAACCGGGTGCTGCAGGTGCTGCACCAGAACAACGTG
GAGCTGGTGAACATCGGCGGCACCGACATCGTGGACGGCAACCAC
AAGCTGACCCTGGGCCTGCTGTGGAGCATCATCCTGCACTGGCAG
GTGAAGGACGTGATGAAGGACGTGATGAGCGACCTGCAGCAGACC
AACAGCGAGAAGATCCTGCTGAGCTGGGTGCGGCAGACCACCCGG
CCCTACAGCCAGGTGAACGTGCTGAACTTCACCACCAGCTGGACC
GACGGCCTGGCCTTCAACGCCGTGCTGCACCGGCACAAGCCCGAC
CTGTTCAGCTGGGACAAGGTGGTGAAGATGAGCCCCATCGAGCGG
CTGGAGCACGCCTTCAGCAAGGCCCAGACCTACCTGGGCATCGAG
AAGCTGCTGGACCCCGAGGACGTGGCCGTGCAGCTGCCCGACAAG
AAGAGCATCATCATGTACCTGACCAGCCTGTTCGAGGTGCTGCCC
CAGCAGGTGACCATCGACGCCATCCGGGAGGTGGAGACCCTGCCC
CGGAAGTACAAGAAGGAGTGCGAGGAGGAGGCCATCAACATCCAG
AGCACCGCCCCCGAGGAGGAGCACGAGAGCCCCCGGGCCGAGACC
CCCAGCACCGTGACCGAGGTGGACATGGACCTGGACAGCTACCAG
ATCGCCCTGGAGGAGGTGCTGACCTGGCTGCTGAGCGCCGAGGAC
ACCTTCCAGGAGCAGGACGACATCAGCGACGACGTGGAGGAGGTG
AAGGACCAGTTCGCCACCCACGAGGCCTTCATGATGGAGCTGACC
GCCCACCAGAGCAGCGTGGGCAGCGTGCTGCAGGCCGGCAACCAG
CTGATCACCCAGGGCACCCTGAGCGACGAGGAGGAGTTCGAGATC
CAGGAGCAGATGACCCTGCTGAACGCCCGGTGGGAGGCCCTGCGG
GTGGAGAGCATGGACCGGCAGAGCCGGCTGCACGACGTGCTGATG
GCCGCTAGCGCCCGGTTCGACCGGAGCGTGGAGAAGTGGCGGCGG
TTCCACTACGACATCAAGATCTTCAACCAGTGGCTGACCGAGGCC
GAGCAGTTCCTGCGGAAGACCCAGATCCCCGAGAACTGGGAGCAC
GCCAAGTACAAGTGGTACCTGAAGGAGCTGCAGGACGGCATCGGC
CAGCGGCAGACCGTGGTGCGGACCCTGAACGCCACCGGCGAGGAG
ATCATCCAGCAGAGCAGCAAGACCGACGCCAGCATCCTGCAGGAG
AAGCTGGGCAGCCTGAACCTGCGGTGGCAGGAGGTGTGCAAGCAG
CTGAGCGACCGGAAGAAGCGGCTGGAGGAGCAGAAGCAGCCCGAC
CTGGCCCCCGGCCTGACCACCATCGGCGCCAGCCCCACCCAGACC
GTGACCCTGGTGACCCAGCCCGTGGTGACCAAGGAGACCGCCATC
AGCAAGCTGGAGATGCCCAGCAGCCTGATGCTGGAGGTGCCCAAG
GACAGCACCCAGTGGCTGGAGGCCAAGGAGGAGGCCGAGCAGGTG
CTGGGCCAGGCCCGGGCCAAGCTGGAGAGCTGGAAGGAGGGCCCC
TACACCGTGGACGCCATCCAGAAGAAGATCACCGAGACCAAGCAG
CTGGCCAAGGACCTGCGGCAGTGGCAGACCAACGTGGACGTGGCC
AACGACCTGGCCCTGAAGCTGCTGCGGGACTACAGCGCCGACGAC
ACCCGGAAGGTGCACATGATCACCGAGAACATCAACGCCAGCTGG
CGGAGCATCCACAAGCGGGTGAGCGAGCGGGAGGCCGCCCTGGAG
GAGACCCACCGGCTGCTGCAGCAGTTCCCCCTGGACCTGGAGAAG
TTCCTGGCCTGGCTGACCGAGGCCGAGACCACCGCCAACGTGCTG
CAGGACGCCACCCGGAAGGAGCGGCTGCTGGAGGACAGCAAGGGC
GTGAAGGAGCTGATGAAGCAGTGGCAGGACCTGCAGGGCGAGATC
GAGGCCCACACCGACGTGTACCACAACCTGGACGAGAACAGCCAG
AAGATCCTGCGGAGCCTGGAGGGCAGCGACGACGCCGTGCTGCTG
CAGCGGCGGCTGGACAACATGAACTTCAAGTGGAGCGAGCTGCGG
AAGAAGAGCCTGAACATCCGGAGCCACCTGGAGGCCAGCAGCGAC
CAGTGGAAGCGGCTGGGCCCCGCCAGCCAGCACTTCCTGAGCACC
AGCGTGCAGGGCCCCTGGGAGCGGGCCATCAGCCCCAACAAGGTG
CCCTACTACATCAACCACGAGACCCAGACCACCTGCTGGGACCAC
CCCAAGATGACCGAGCTGTACCAGAGCCTGGCCGACCTGAACAAC
GTGCGGTTCAGCGCCTACCGGACCGCCATGAAGCTGCGGCGGCTG
CAGAAGGCCCTGTGCCTGGACCTGCTGAGCCTGAGCGCCGCCTGC
GACGCCCTGGACCAGCACAACCTGAAGCAGAACGACCAGCCCATG
GACATCCTGCAGATCATCAACTGCCTGACCACCATCTACGACCGG
CTGGAGCAGGAGCACAACAACCTGGTGAACGTGCCCCTGTGCGTG
GACATGTGCCTGAACTGGCTGCTGAACGTGTACGACACCGGCCGG
ACCGGCCGGATCCGGGTGCTGAGCTTCAAGACCGGCATCATCAGC
CTGTGCAAGGCCCACCTGGAGGACAAGTACCGGTACCTGTTCAAG
CAGGTGGCCAGCAGCACCGGCTTCTGCGACCAGCGGCGGCTGGGC
CTGCTGCTGCACGACAGCATCCAGATCCCCCGGCAGCTGGGCGAG
GTGGCCAGCTTCGGCGGCAGCAACATCGAGCCCAGCGTGCGGAGC
TGCTTCCAGTTCGCCAACAACAAGCCCGAGATCGAGGCCGCCCTG
TTCCTGGACTGGATGCGGCTGGAGCCCCAGAGCATGGTGTGGCTG
CCCGTGCTGCACCGGGTGGCCGCCGCCGAGACCGCCAAGCACCAG
GCCAAGTGCAACATCTGCAAGGAGTGCCCCATCATCGGCTTCCGG
TACCGGAGCCTGAAGCACTTCAACTACGACATCTGCCAGAGCTGC
TTCTTCAGCGGCCGGGTGGCCAAGGGCCACAAGATGCACTACCCC
ATGGTGGAGTACTGCACCCCCACCACCAGCGGCGAGGACGTGCGG
GACTTCGCCAAGGTGCTGAAGAACAAGTTCCGGACCAAGCGGTAC
TTCGCCAAGCACCCCCGGATGGGCTACCTGCCCGTGCAGACCGTG
CTGGAGGGCGACAACATGGAGACCCCCGTGACCCTGATCAACTTC
TGGCCCGTGGACAGCGCCCCCGCCAGCAGCCCCCAGCTGAGCCAC
GACGACACCCACAGCCGGATCGAGCACTACGCCAGCCGGCTGGCC
GAGATGGAGAACAGCAACGGCAGCTACCTGAACGACAGCATCAGC
CCCAACGAGAGCATCGACGACGAGCACCTGCTGATCCAGCACTAC
TGCCAGAGCCTGAACCAGGACAGCCCCCTGAGCCAGCCCCGGAGC
UtrophinNterm-R2_DystrophinR17_H3_R22_
H4-trCterm + SynBS + coiled coil
Human sequence without codon alterations:
(SEQ ID NO: 180)
ATGGCCAAGTATGGAGAACATGAAGCCAGTCCTGACAATGGGCAG
AACGAATTCAGTGATATCATTAAGTCCAGATCTGATGAACACAAT
GACGTACAGAAGAAAACCTTTACCAAATGGATAAATGCTCGATTT
TCAAAGAGTGGGAAACCACCCATCAATGATATGTTCACAGACCTC
AAAGATGGAAGGAAGCTATTGGATCTTCTAGAAGGCCTCACAGGA
ACATCACTGCCAAAGGAACGTGGTTCCACAAGGGTACATGCCTTA
AATAACGTCAACAGAGTGCTGCAGGTTTTACATCAGAACAATGTG
GAATTAGTGAATATAGGGGGAACTGACATTGTGGATGGAAATCAC
AAACTGACTTTGGGGTTACTTTGGAGCATCATTTTGCACTGGCAG
GTGAAAGATGTCATGAAGGATGTCATGTCGGACCTGCAGCAGACG
AACAGTGAGAAGATCCTGCTCAGCTGGGTGCGTCAGACCACCAGG
CCCTACAGCCAAGTCAACGTCCTCAACTTCACCACCAGCTGGACA
GATGGACTCGCCTTTAATGCTGTCCTCCACCGACATAAACCTGAT
CTCTTCAGCTGGGATAAAGTTGTCAAAATGTCACCAATTGAGAGA
CTTGAACATGCCTTCAGCAAGGCTCAAACTTATTTGGGAATTGAA
AAGCTGTTAGATCCTGAAGATGTTGCCGTTCAGCTTCCTGACAAG
AAATCCATAATTATGTATTTAACATCTTTGTTTGAGGTGCTACCT
CAGCAAGTCACCATAGACGCCATCCGTGAGGTAGAGACACTCCCA
AGGAAATATAAAAAAGAATGTGAAGAAGAGGCAATTAATATACAG
AGTACAGCGCCTGAGGAGGAGCATGAGAGTCCCCGAGCTGAAACT
CCCAGCACTGTCACTGAGGTTGACATGGATCTGGACAGCTATCAG
ATTGCGTTGGAGGAAGTGCTGACCTGGTTGCTTTCTGCTGAGGAC
ACTTTCCAGGAGCAGGATGATATTTCTGATGATGTTGAAGAAGTC
AAAGACCAGTTTGCAACCCATGAAGCTTTTATGATGGAACTGACT
GCACACCAGAGCAGTGTGGGCAGCGTCCTGCAGGCAGGCAACCAA
CTGATAACACAAGGAACTCTGTCAGACGAAGAAGAATTTGAGATT
CAGGAACAGATGACCCTGCTGAATGCTAGATGGGAGGCTCTTAGG
GTGGAGAGTATGGACAGACAGTCCCGGCTGCACGATGTGCTGATG
GAACTGCAGAAGAAGCAACTGCAGCAGCTCTCCGCCTGGTTAACA
CTCACAGAGGAGCGCATTCAGAAGATGGAAACTTGCCCCCTGGAT
GATGATGTAAAATCTCTACAAAAGCTGCTAGAAGAACATAAAAGT
TTGCAAAGTGATCTTGAGGCTGAACAGGTGAAAGTAAATTCACTA
ACTCACATGGTGGTCATTGTTGATGAAAACAGTGGTGAGAGTGCT
ACAGCTATCCTAGAAGACCAGTTACAGAAACTTGGTGAGCGCTGG
ACAGCAGTATGCCGTTGGACTGAAGAACGCTGGAATAGGTTACAA
GAAATCGCCGCTAGCGCCCGATTTGACAGATCTGTTGAGAAATGG
CGGCGTTTTCATTATGATATAAAGATATTTAATCAGTGGCTAACA
GAAGCTGAACAGTTTCTCAGAAAGACACAAATTCCTGAGAATTGG
GAACATGCTAAATACAAATGGTATCTTAAGGAACTCCAGGATGGC
ATTGGGCAGCGGCAAACTGTTGTCAGAACATTGAATGCAACTGGG
GAAGAAATAATTCAGCAATCCTCAAAAACAGATGCCAGTATTCTA
CAGGAAAAATTGGGAAGCCTGAATCTGCGGTGGCAGGAGGTCTGC
AAACAGCTGTCAGACAGAAAAAAGAGGCTAGAAGAACAAAAGCAG
CCTGACCTAGCTCCTGGACTGACCACTATTGGAGCCTCTCCTACT
CAGACTGTTACTCTGGTGACACAACCTGTGGTTACTAAGGAAACT
GCCATCTCCAAACTAGAAATGCCATCTTCCTTGATGTTGGAGGTA
CCTGAAGAAACTCATAGATTACTGCAACAGTTCCCCCTGGACCTG
GAAAAGTTTCTTGCCTGGCTTACAGAAGCTGAAACAACTGCCAAT
GTCCTACAGGATGCTACCCGTAAGGAAAGGCTCCTAGAAGACTCC
AAGGGAGTAAAAGAGCTGATGAAACAATGGCAAGACCTCCAAGGT
GAAATTGAAGCTCACACAGATGTTTATCACAACCTGGATGAAAAC
AGCCAAAAAATCCTGAGATCCCTGGAAGGTTCCGATGATGCAGTC
CTGTTACAAAGACGTTTGGATAACATGAACTTCAAGTGGAGTGAA
CTTCGGAAAAAGTCTCTCAACATTAGGTCCCATTTGGAAGCCAGT
TCTGACCAGTGGAAGCGTCTGGGTCCAGCATCTCAGCACTTTCTT
TCCACGTCTGTCCAGGGTCCCTGGGAGAGAGCCATCTCGCCAAAC
AAAGTGCCCTACTATATCAACCACGAGACTCAAACAACTTGCTGG
GACCATCCCAAAATGACAGAGCTCTACCAGTCTTTAGCTGACCTG
AATAATGTCAGATTCTCAGCTTATAGGACTGCCATGAAACTCCGA
AGACTGCAGAAGGCCCTTTGCTTGGATCTCTTGAGCCTGTCAGCT
GCATGTGATGCCTTGGACCAGCACAACCTCAAGCAAAATGACCAG
CCCATGGATATCCTGCAGATTATTAATTGTTTGACCACTATTTAT
GACCGCCTGGAGCAAGAGCACAACAATTTGGTCAACGTCCCTCTC
TGCGTGGATATGTGTCTGAACTGGCTGCTGAATGTTTATGATACG
GGACGAACAGGGAGGATCCGTGTCCTGTCTTTTAAAACTGGCATC
ATTTCCCTGTGTAAAGCACATTTGGAAGACAAGTACAGATACCTT
TTCAAGCAAGTGGCAAGTTCAACAGGATTTTGTGACCAGCGCAGG
CTGGGCCTCCTTCTGCATGATTCTATCCAAATTCCAAGACAGTTG
GGTGAAGTTGCATCCTTTGGGGGCAGTAACATTGAGCCAAGTGTC
CGGAGCTGCTTCCAATTTGCTAATAATAAGCCAGAGATCGAAGCG
GCCCTCTTCCTAGACTGGATGAGACTGGAACCCCAGTCCATGGTG
TGGCTGCCCGTCCTGCACAGAGTGGCTGCTGCAGAAACTGCCAAG
CATCAGGCCAAATGTAACATCTGCAAAGAGTGTCCAATCATTGGA
TTCAGGTACAGGAGTCTAAAGCACTTTAATTATGACATCTGCCAA
AGCTGCTTTTTTTCTGGTCGAGTTGCAAAAGGCCATAAAATGCAC
TATCCCATGGTGGAATATTGCACTCCGACTACATCAGGAGAAGAT
GTTCGAGACTTTGCCAAGGTACTAAAAAACAAATTTCGAACCAAA
AGGTATTTTGCGAAGCATCCCCGAATGGGCTACCTGCCAGTGCAG
ACTGTCTTAGAGGGGGACAACATGGAAACTCCCGTTACTCTGATC
AACTTCTGGCCAGTAGATTCTGCGCCTGCCTCGTCCCCTCAGCTT
TCACACGATGATACTCATTCACGCATTGAACATTATGCTAGCAGG
CTAGCAGAAATGGAAAACAGCAATGGATCTTATCTAAATGATAGC
ATCTCTCCTAATGAGAGCATAGATGATGAACATTTGTTAATCCAG
CATTACTGCCAAAGTTTGAACCAGGACTCCCCCCTGAGCCAGCCT
CGTAGTCCTGCCCAGATCTTGATTTCCTTAGAGAGTGAGGAAAGA
GGGGAGCTAGAGAGAATCCTAGCAGATCTTGAGGAAGAAAACAGG
AATCTGCAAGCAGAATATGACCGTCTAAAGCAGCAGCACGAACAT
AAAGGCCTGTCCCCACTGCCGTCCCCTCCTGAAATGATGCCCACC
TCTCCCCAGAGTCCC
Human sequence with codon optimization:
(SEQ ID NO: 181)
ATGGCCAAGTACGGCGAGCACGAGGCCAGCCCCGACAACGGCCAG
AACGAGTTCAGCGACATCATCAAGAGCCGGAGCGACGAGCACAAC
GACGTGCAGAAGAAGACCTTCACCAAGTGGATCAACGCCCGGTTC
AGCAAGAGCGGCAAGCCCCCCATCAACGACATGTTCACCGACCTG
AAGGACGGCCGGAAGCTGCTGGACCTGCTGGAGGGCCTGACCGGC
ACCAGCCTGCCCAAGGAGCGGGGCAGCACCCGGGTGCACGCCCTG
AACAACGTGAACCGGGTGCTGCAGGTGCTGCACCAGAACAACGTG
GAGCTGGTGAACATCGGCGGCACCGACATCGTGGACGGCAACCAC
AAGCTGACCCTGGGCCTGCTGTGGAGCATCATCCTGCACTGGCAG
GTGAAGGACGTGATGAAGGACGTGATGAGCGACCTGCAGCAGACC
AACAGCGAGAAGATCCTGCTGAGCTGGGTGCGGCAGACCACCCGG
CCCTACAGCCAGGTGAACGTGCTGAACTTCACCACCAGCTGGACC
GACGGCCTGGCCTTCAACGCCGTGCTGCACCGGCACAAGCCCGAC
CTGTTCAGCTGGGACAAGGTGGTGAAGATGAGCCCCATCGAGCGG
CTGGAGCACGCCTTCAGCAAGGCCCAGACCTACCTGGGCATCGAG
AAGCTGCTGGACCCCGAGGACGTGGCCGTGCAGCTGCCCGACAAG
AAGAGCATCATCATGTACCTGACCAGCCTGTTCGAGGTGCTGCCC
CAGCAGGTGACCATCGACGCCATCCGGGAGGTGGAGACCCTGCCC
CGGAAGTACAAGAAGGAGTGCGAGGAGGAGGCCATCAACATCCAG
AGCACCGCCCCCGAGGAGGAGCACGAGAGCCCCCGGGCCGAGACC
CCCAGCACCGTGACCGAGGTGGACATGGACCTGGACAGCTACCAG
ATCGCCCTGGAGGAGGTGCTGACCTGGCTGCTGAGCGCCGAGGAC
ACCTTCCAGGAGCAGGACGACATCAGCGACGACGTGGAGGAGGTG
AAGGACCAGTTCGCCACCCACGAGGCCTTCATGATGGAGCTGACC
GCCCACCAGAGCAGCGTGGGCAGCGTGCTGCAGGCCGGCAACCAG
CTGATCACCCAGGGCACCCTGAGCGACGAGGAGGAGTTCGAGATC
CAGGAGCAGATGACCCTGCTGAACGCCCGGTGGGAGGCCCTGCGG
GTGGAGAGCATGGACCGGCAGAGCCGGCTGCACGACGTGCTGATG
GAGCTGCAGAAGAAGCAGCTGCAGCAGCTGAGCGCCTGGCTGACC
CTGACCGAGGAGCGGATCCAGAAGATGGAGACCTGCCCCCTGGAC
GACGACGTGAAGAGCCTGCAGAAGCTGCTGGAGGAGCACAAGAGC
CTGCAGAGCGACCTGGAGGCCGAGCAGGTGAAGGTGAACAGCCTG
ACCCACATGGTGGTGATCGTGGACGAGAACAGCGGCGAGAGCGCC
ACCGCCATCCTGGAGGACCAGCTGCAGAAGCTGGGCGAGCGGTGG
ACCGCCGTGTGCCGGTGGACCGAGGAGCGGTGGAACCGGCTGCAG
GAGATCGCCGCTAGCGCCCGGTTCGACCGGAGCGTGGAGAAGTGG
CGGCGGTTCCACTACGACATCAAGATCTTCAACCAGTGGCTGACC
GAGGCCGAGCAGTTCCTGCGGAAGACCCAGATCCCCGAGAACTGG
GAGCACGCCAAGTACAAGTGGTACCTGAAGGAGCTGCAGGACGGC
ATCGGCCAGCGGCAGACCGTGGTGCGGACCCTGAACGCCACCGGC
GAGGAGATCATCCAGCAGAGCAGCAAGACCGACGCCAGCATCCTG
CAGGAGAAGCTGGGCAGCCTGAACCTGCGGTGGCAGGAGGTGTGC
AAGCAGCTGAGCGACCGGAAGAAGCGGCTGGAGGAGCAGAAGCAG
CCCGACCTGGCCCCCGGCCTGACCACCATCGGCGCCAGCCCCACC
CAGACCGTGACCCTGGTGACCCAGCCCGTGGTGACCAAGGAGACC
GCCATCAGCAAGCTGGAGATGCCCAGCAGCCTGATGCTGGAGGTG
CCCGAGGAGACCCACCGGCTGCTGCAGCAGTTCCCCCTGGACCTG
GAGAAGTTCCTGGCCTGGCTGACCGAGGCCGAGACCACCGCCAAC
GTGCTGCAGGACGCCACCCGGAAGGAGCGGCTGCTGGAGGACAGC
AAGGGCGTGAAGGAGCTGATGAAGCAGTGGCAGGACCTGCAGGGC
GAGATCGAGGCCCACACCGACGTGTACCACAACCTGGACGAGAAC
AGCCAGAAGATCCTGCGGAGCCTGGAGGGCAGCGACGACGCCGTG
CTGCTGCAGCGGCGGCTGGACAACATGAACTTCAAGTGGAGCGAG
CTGCGGAAGAAGAGCCTGAACATCCGGAGCCACCTGGAGGCCAGC
AGCGACCAGTGGAAGCGGCTGGGCCCCGCCAGCCAGCACTTCCTG
AGCACCAGCGTGCAGGGCCCCTGGGAGCGGGCCATCAGCCCCAAC
AAGGTGCCCTACTACATCAACCACGAGACCCAGACCACCTGCTGG
GACCACCCCAAGATGACCGAGCTGTACCAGAGCCTGGCCGACCTG
AACAACGTGCGGTTCAGCGCCTACCGGACCGCCATGAAGCTGCGG
CGGCTGCAGAAGGCCCTGTGCCTGGACCTGCTGAGCCTGAGCGCC
GCCTGCGACGCCCTGGACCAGCACAACCTGAAGCAGAACGACCAG
CCCATGGACATCCTGCAGATCATCAACTGCCTGACCACCATCTAC
GACCGGCTGGAGCAGGAGCACAACAACCTGGTGAACGTGCCCCTG
TGCGTGGACATGTGCCTGAACTGGCTGCTGAACGTGTACGACACC
GGCCGGACCGGCCGGATCCGGGTGCTGAGCTTCAAGACCGGCATC
ATCAGCCTGTGCAAGGCCCACCTGGAGGACAAGTACCGGTACCTG
TTCAAGCAGGTGGCCAGCAGCACCGGCTTCTGCGACCAGCGGCGG
CTGGGCCTGCTGCTGCACGACAGCATCCAGATCCCCCGGCAGCTG
GGCGAGGTGGCCAGCTTCGGCGGCAGCAACATCGAGCCCAGCGTG
CGGAGCTGCTTCCAGTTCGCCAACAACAAGCCCGAGATCGAGGCC
GCCCTGTTCCTGGACTGGATGCGGCTGGAGCCCCAGAGCATGGTG
TGGCTGCCCGTGCTGCACCGGGTGGCCGCCGCCGAGACCGCCAAG
CACCAGGCCAAGTGCAACATCTGCAAGGAGTGCCCCATCATCGGC
TTCCGGTACCGGAGCCTGAAGCACTTCAACTACGACATCTGCCAG
AGCTGCTTCTTCAGCGGCCGGGTGGCCAAGGGCCACAAGATGCAC
TACCCCATGGTGGAGTACTGCACCCCCACCACCAGCGGCGAGGAC
GTGCGGGACTTCGCCAAGGTGCTGAAGAACAAGTTCCGGACCAAG
CGGTACTTCGCCAAGCACCCCCGGATGGGCTACCTGCCCGTGCAG
ACCGTGCTGGAGGGCGACAACATGGAGACCCCCGTGACCCTGATC
AACTTCTGGCCCGTGGACAGCGCCCCCGCCAGCAGCCCCCAGCTG
AGCCACGACGACACCCACAGCCGGATCGAGCACTACGCCAGCCGG
CTGGCCGAGATGGAGAACAGCAACGGCAGCTACCTGAACGACAGC
ATCAGCCCCAACGAGAGCATCGACGACGAGCACCTGCTGATCCAG
CACTACTGCCAGAGCCTGAACCAGGACAGCCCCCTGAGCCAGCCC
CGGAGCCCCGCCCAGATCCTGATCAGCCTGGAGAGCGAGGAGCGG
GGCGAGCTGGAGCGGATCCTGGCCGACCTGGAGGAGGAGAACCGG
AACCTGCAGGCCGAGTACGACCGGCTGAAGCAGCAGCACGAGCAC
AAGGGCCTGAGCCCCCTGCCCAGCCCCCCCGAGATGATGCCCACC
AGCCCCCAGAGCCCC
UtrophinNterm-R1_DystrophinR17_H3_R21-
R22_H4-trCterm + SynBS + coiled coil
Human sequence without codon alterations:
(SEQ ID NO: 182)
ATGGCCAAGTATGGAGAACATGAAGCCAGTCCTGACAATGGGCAG
AACGAATTCAGTGATATCATTAAGTCCAGATCTGATGAACACAAT
GACGTACAGAAGAAAACCTTTACCAAATGGATAAATGCTCGATTT
TCAAAGAGTGGGAAACCACCCATCAATGATATGTTCACAGACCTC
AAAGATGGAAGGAAGCTATTGGATCTTCTAGAAGGCCTCACAGGA
ACATCACTGCCAAAGGAACGTGGTTCCACAAGGGTACATGCCTTA
AATAACGTCAACAGAGTGCTGCAGGTTTTACATCAGAACAATGTG
GAATTAGTGAATATAGGGGGAACTGACATTGTGGATGGAAATCAC
AAACTGACTTTGGGGTTACTTTGGAGCATCATTTTGCACTGGCAG
GTGAAAGATGTCATGAAGGATGTCATGTCGGACCTGCAGCAGACG
AACAGTGAGAAGATCCTGCTCAGCTGGGTGCGTCAGACCACCAGG
CCCTACAGCCAAGTCAACGTCCTCAACTTCACCACCAGCTGGACA
GATGGACTCGCCTTTAATGCTGTCCTCCACCGACATAAACCTGAT
CTCTTCAGCTGGGATAAAGTTGTCAAAATGTCACCAATTGAGAGA
CTTGAACATGCCTTCAGCAAGGCTCAAACTTATTTGGGAATTGAA
AAGCTGTTAGATCCTGAAGATGTTGCCGTTCAGCTTCCTGACAAG
AAATCCATAATTATGTATTTAACATCTTTGTTTGAGGTGCTACCT
CAGCAAGTCACCATAGACGCCATCCGTGAGGTAGAGACACTCCCA
AGGAAATATAAAAAAGAATGTGAAGAAGAGGCAATTAATATACAG
AGTACAGCGCCTGAGGAGGAGCATGAGAGTCCCCGAGCTGAAACT
CCCAGCACTGTCACTGAGGTTGACATGGATCTGGACAGCTATCAG
ATTGCGTTGGAGGAAGTGCTGACCTGGTTGCTTTCTGCTGAGGAC
ACTTTCCAGGAGCAGGATGATATTTCTGATGATGTTGAAGAAGTC
AAAGACCAGTTTGCAACCCATGAAGCTTTTATGATGGAACTGACT
GCACACCAGAGCAGTGTGGGCAGCGTCCTGCAGGCAGGCAACCAA
CTGATAACACAAGGAACTCTGTCAGACGAAGAAGAATTTGAGATT
CAGGAACAGATGACCCTGCTGAATGCTAGATGGGAGGCTCTTAGG
GTGGAGAGTATGGACAGACAGTCCCGGCTGCACGATGTGCTGATG
GCCGCTAGCGCCCGATTTGACAGATCTGTTGAGAAATGGCGGCGT
TTTCATTATGATATAAAGATATTTAATCAGTGGCTAACAGAAGCT
GAACAGTTTCTCAGAAAGACACAAATTCCTGAGAATTGGGAACAT
GCTAAATACAAATGGTATCTTAAGGAACTCCAGGATGGCATTGGG
CAGCGGCAAACTGTTGTCAGAACATTGAATGCAACTGGGGAAGAA
ATAATTCAGCAATCCTCAAAAACAGATGCCAGTATTCTACAGGAA
AAATTGGGAAGCCTGAATCTGCGGTGGCAGGAGGTCTGCAAACAG
CTGTCAGACAGAAAAAAGAGGCTAGAAGAACAAAAGCAGCCTGAC
CTAGCTCCTGGACTGACCACTATTGGAGCCTCTCCTACTCAGACT
GTTACTCTGGTGACACAACCTGTGGTTACTAAGGAAACTGCCATC
TCCAAACTAGAAATGCCATCTTCCTTGATGTTGGAGGTACCTAAG
GATTCAACACAATGGCTGGAAGCTAAGGAAGAAGCTGAGCAGGTC
TTAGGACAGGCCAGAGCCAAGCTTGAGTCATGGAAGGAGGGTCCC
TATACAGTAGATGCAATCCAAAAGAAAATCACAGAAACCAAGCAG
TTGGCCAAAGACCTCCGCCAGTGGCAGACAAATGTAGATGTGGCA
AATGACTTGGCCCTGAAACTTCTCCGGGATTATTCTGCAGATGAT
ACCAGAAAAGTCCACATGATAACAGAGAATATCAATGCCTCTTGG
AGAAGCATTCATAAAAGGGTGAGTGAGCGAGAGGCTGCTTTGGAA
GAAACTCATAGATTACTGCAACAGTTCCCCCTGGACCTGGAAAAG
TTTCTTGCCTGGCTTACAGAAGCTGAAACAACTGCCAATGTCCTA
CAGGATGCTACCCGTAAGGAAAGGCTCCTAGAAGACTCCAAGGGA
GTAAAAGAGCTGATGAAACAATGGCAAGACCTCCAAGGTGAAATT
GAAGCTCACACAGATGTTTATCACAACCTGGATGAAAACAGCCAA
AAAATCCTGAGATCCCTGGAAGGTTCCGATGATGCAGTCCTGTTA
CAAAGACGTTTGGATAACATGAACTTCAAGTGGAGTGAACTTCGG
AAAAAGTCTCTCAACATTAGGTCCCATTTGGAAGCCAGTTCTGAC
CAGTGGAAGCGTCTGGGTCCAGCATCTCAGCACTTTCTTTCCACG
TCTGTCCAGGGTCCCTGGGAGAGAGCCATCTCGCCAAACAAAGTG
CCCTACTATATCAACCACGAGACTCAAACAACTTGCTGGGACCAT
CCCAAAATGACAGAGCTCTACCAGTCTTTAGCTGACCTGAATAAT
GTCAGATTCTCAGCTTATAGGACTGCCATGAAACTCCGAAGACTG
CAGAAGGCCCTTTGCTTGGATCTCTTGAGCCTGTCAGCTGCATGT
GATGCCTTGGACCAGCACAACCTCAAGCAAAATGACCAGCCCATG
GATATCCTGCAGATTATTAATTGTTTGACCACTATTTATGACCGC
CTGGAGCAAGAGCACAACAATTTGGTCAACGTCCCTCTCTGCGTG
GATATGTGTCTGAACTGGCTGCTGAATGTTTATGATACGGGACGA
ACAGGGAGGATCCGTGTCCTGTCTTTTAAAACTGGCATCATTTCC
CTGTGTAAAGCACATTTGGAAGACAAGTACAGATACCTTTTCAAG
CAAGTGGCAAGTTCAACAGGATTTTGTGACCAGCGCAGGCTGGGC
CTCCTTCTGCATGATTCTATCCAAATTCCAAGACAGTTGGGTGAA
GTTGCATCCTTTGGGGGCAGTAACATTGAGCCAAGTGTCCGGAGC
TGCTTCCAATTTGCTAATAATAAGCCAGAGATCGAAGCGGCCCTC
TTCCTAGACTGGATGAGACTGGAACCCCAGTCCATGGTGTGGCTG
CCCGTCCTGCACAGAGTGGCTGCTGCAGAAACTGCCAAGCATCAG
GCCAAATGTAACATCTGCAAAGAGTGTCCAATCATTGGATTCAGG
TACAGGAGTCTAAAGCACTTTAATTATGACATCTGCCAAAGCTGC
TTTTTTTCTGGTCGAGTTGCAAAAGGCCATAAAATGCACTATCCC
ATGGTGGAATATTGCACTCCGACTACATCAGGAGAAGATGTTCGA
GACTTTGCCAAGGTACTAAAAAACAAATTTCGAACCAAAAGGTAT
TTTGCGAAGCATCCCCGAATGGGCTACCTGCCAGTGCAGACTGTC
TTAGAGGGGGACAACATGGAAACTCCCGTTACTCTGATCAACTTC
TGGCCAGTAGATTCTGCGCCTGCCTCGTCCCCTCAGCTTTCACAC
GATGATACTCATTCACGCATTGAACATTATGCTAGCAGGCTAGCA
GAAATGGAAAACAGCAATGGATCTTATCTAAATGATAGCATCTCT
CCTAATGAGAGCATAGATGATGAACATTTGTTAATCCAGCATTAC
TGCCAAAGTTTGAACCAGGACTCCCCCCTGAGCCAGCCTCGTAGT
CCTGCCCAGATCTTGATTTCCTTAGAGAGTGAGGAAAGAGGGGAG
CTAGAGAGAATCCTAGCAGATCTTGAGGAAGAAAACAGGAATCTG
CAAGCAGAATATGACCGTCTAAAGCAGCAGCACGAACATAAAGGC
CTGTCCCCACTGCCGTCCCCTCCTGAAATGATGCCCACCTCTCCC
CAGAGTCCC
Human sequence with codon optimization:
(SEQ ID NO: 183)
ATGGCCAAGTACGGCGAGCACGAGGCCAGCCCCGACAACGGCCAG
AACGAGTTCAGCGACATCATCAAGAGCCGGAGCGACGAGCACAAC
GACGTGCAGAAGAAGACCTTCACCAAGTGGATCAACGCCCGGTTC
AGCAAGAGCGGCAAGCCCCCCATCAACGACATGTTCACCGACCTG
AAGGACGGCCGGAAGCTGCTGGACCTGCTGGAGGGCCTGACCGGC
ACCAGCCTGCCCAAGGAGCGGGGCAGCACCCGGGTGCACGCCCTG
AACAACGTGAACCGGGTGCTGCAGGTGCTGCACCAGAACAACGTG
GAGCTGGTGAACATCGGCGGCACCGACATCGTGGACGGCAACCAC
AAGCTGACCCTGGGCCTGCTGTGGAGCATCATCCTGCACTGGCAG
GTGAAGGACGTGATGAAGGACGTGATGAGCGACCTGCAGCAGACC
AACAGCGAGAAGATCCTGCTGAGCTGGGTGCGGCAGACCACCCGG
CCCTACAGCCAGGTGAACGTGCTGAACTTCACCACCAGCTGGACC
GACGGCCTGGCCTTCAACGCCGTGCTGCACCGGCACAAGCCCGAC
CTGTTCAGCTGGGACAAGGTGGTGAAGATGAGCCCCATCGAGCGG
CTGGAGCACGCCTTCAGCAAGGCCCAGACCTACCTGGGCATCGAG
AAGCTGCTGGACCCCGAGGACGTGGCCGTGCAGCTGCCCGACAAG
AAGAGCATCATCATGTACCTGACCAGCCTGTTCGAGGTGCTGCCC
CAGCAGGTGACCATCGACGCCATCCGGGAGGTGGAGACCCTGCCC
CGGAAGTACAAGAAGGAGTGCGAGGAGGAGGCCATCAACATCCAG
AGCACCGCCCCCGAGGAGGAGCACGAGAGCCCCCGGGCCGAGACC
CCCAGCACCGTGACCGAGGTGGACATGGACCTGGACAGCTACCAG
ATCGCCCTGGAGGAGGTGCTGACCTGGCTGCTGAGCGCCGAGGAC
ACCTTCCAGGAGCAGGACGACATCAGCGACGACGTGGAGGAGGTG
AAGGACCAGTTCGCCACCCACGAGGCCTTCATGATGGAGCTGACC
GCCCACCAGAGCAGCGTGGGCAGCGTGCTGCAGGCCGGCAACCAG
CTGATCACCCAGGGCACCCTGAGCGACGAGGAGGAGTTCGAGATC
CAGGAGCAGATGACCCTGCTGAACGCCCGGTGGGAGGCCCTGCGG
GTGGAGAGCATGGACCGGCAGAGCCGGCTGCACGACGTGCTGATG
GAGCTGCAGAAGAAGCAGCTGCAGCAGCTGAGCGCCTGGCTGACC
CTGACCGAGGAGCGGATCCAGAAGATGGAGACCTGCCCCCTGGAC
GACGACGTGAAGAGCCTGCAGAAGCTGCTGGAGGAGCACAAGAGC
CTGCAGAGCGACCTGGAGGCCGAGCAGGTGAAGGTGAACAGCCTG
ACCCACATGGTGGTGATCGTGGACGAGAACAGCGGCGAGAGCGCC
ACCGCCATCCTGGAGGACCAGCTGCAGAAGCTGGGCGAGCGGTGG
ACCGCCGTGTGCCGGTGGACCGAGGAGCGGTGGAACCGGCTGCAG
GAGATCGCCGCTAGCGCCCGGTTCGACCGGAGCGTGGAGAAGTGG
CGGCGGTTCCACTACGACATCAAGATCTTCAACCAGTGGCTGACC
GAGGCCGAGCAGTTCCTGCGGAAGACCCAGATCCCCGAGAACTGG
GAGCACGCCAAGTACAAGTGGTACCTGAAGGAGCTGCAGGACGGC
ATCGGCCAGCGGCAGACCGTGGTGCGGACCCTGAACGCCACCGGC
GAGGAGATCATCCAGCAGAGCAGCAAGACCGACGCCAGCATCCTG
CAGGAGAAGCTGGGCAGCCTGAACCTGCGGTGGCAGGAGGTGTGC
AAGCAGCTGAGCGACCGGAAGAAGCGGCTGGAGGAGCAGAAGCAG
CCCGACCTGGCCCCCGGCCTGACCACCATCGGCGCCAGCCCCACC
CAGACCGTGACCCTGGTGACCCAGCCCGTGGTGACCAAGGAGACC
GCCATCAGCAAGCTGGAGATGCCCAGCAGCCTGATGCTGGAGGTG
CCCAAGGACAGCACCCAGTGGCTGGAGGCCAAGGAGGAGGCCGAG
CAGGTGCTGGGCCAGGCCCGGGCCAAGCTGGAGAGCTGGAAGGAG
GGCCCCTACACCGTGGACGCCATCCAGAAGAAGATCACCGAGACC
AAGCAGCTGGCCAAGGACCTGCGGCAGTGGCAGACCAACGTGGAC
GTGGCCAACGACCTGGCCCTGAAGCTGCTGCGGGACTACAGCGCC
GACGACACCCGGAAGGTGCACATGATCACCGAGAACATCAACGCC
AGCTGGCGGAGCATCCACAAGCGGGTGAGCGAGCGGGAGGCCGCC
CTGGAGGAGACCCACCGGCTGCTGCAGCAGTTCCCCCTGGACCTG
GAGAAGTTCCTGGCCTGGCTGACCGAGGCCGAGACCACCGCCAAC
GTGCTGCAGGACGCCACCCGGAAGGAGCGGCTGCTGGAGGACAGC
AAGGGCGTGAAGGAGCTGATGAAGCAGTGGCAGGACCTGCAGGGC
GAGATCGAGGCCCACACCGACGTGTACCACAACCTGGACGAGAAC
AGCCAGAAGATCCTGCGGAGCCTGGAGGGCAGCGACGACGCCGTG
CTGCTGCAGCGGCGGCTGGACAACATGAACTTCAAGTGGAGCGAG
CTGCGGAAGAAGAGCCTGAACATCCGGAGCCACCTGGAGGCCAGC
AGCGACCAGTGGAAGCGGCTGGGCCCCGCCAGCCAGCACTTCCTG
AGCACCAGCGTGCAGGGCCCCTGGGAGCGGGCCATCAGCCCCAAC
AAGGTGCCCTACTACATCAACCACGAGACCCAGACCACCTGCTGG
GACCACCCCAAGATGACCGAGCTGTACCAGAGCCTGGCCGACCTG
AACAACGTGCGGTTCAGCGCCTACCGGACCGCCATGAAGCTGCGG
CGGCTGCAGAAGGCCCTGTGCCTGGACCTGCTGAGCCTGAGCGCC
GCCTGCGACGCCCTGGACCAGCACAACCTGAAGCAGAACGACCAG
CCCATGGACATCCTGCAGATCATCAACTGCCTGACCACCATCTAC
GACCGGCTGGAGCAGGAGCACAACAACCTGGTGAACGTGCCCCTG
TGCGTGGACATGTGCCTGAACTGGCTGCTGAACGTGTACGACACC
GGCCGGACCGGCCGGATCCGGGTGCTGAGCTTCAAGACCGGCATC
ATCAGCCTGTGCAAGGCCCACCTGGAGGACAAGTACCGGTACCTG
TTCAAGCAGGTGGCCAGCAGCACCGGCTTCTGCGACCAGCGGCGG
CTGGGCCTGCTGCTGCACGACAGCATCCAGATCCCCCGGCAGCTG
GGCGAGGTGGCCAGCTTCGGCGGCAGCAACATCGAGCCCAGCGTG
CGGAGCTGCTTCCAGTTCGCCAACAACAAGCCCGAGATCGAGGCC
GCCCTGTTCCTGGACTGGATGCGGCTGGAGCCCCAGAGCATGGTG
TGGCTGCCCGTGCTGCACCGGGTGGCCGCCGCCGAGACCGCCAAG
CACCAGGCCAAGTGCAACATCTGCAAGGAGTGCCCCATCATCGGC
TTCCGGTACCGGAGCCTGAAGCACTTCAACTACGACATCTGCCAG
AGCTGCTTCTTCAGCGGCCGGGTGGCCAAGGGCCACAAGATGCAC
TACCCCATGGTGGAGTACTGCACCCCCACCACCAGCGGCGAGGAC
GTGCGGGACTTCGCCAAGGTGCTGAAGAACAAGTTCCGGACCAAG
CGGTACTTCGCCAAGCACCCCCGGATGGGCTACCTGCCCGTGCAG
ACCGTGCTGGAGGGCGACAACATGGAGACCCCCGTGACCCTGATC
AACTTCTGGCCCGTGGACAGCGCCCCCGCCAGCAGCCCCCAGCTG
AGCCACGACGACACCCACAGCCGGATCGAGCACTACGCCAGCCGG
CTGGCCGAGATGGAGAACAGCAACGGCAGCTACCTGAACGACAGC
ATCAGCCCCAACGAGAGCATCGACGACGAGCACCTGCTGATCCAG
CACTACTGCCAGAGCCTGAACCAGGACAGCCCCCTGAGCCAGCCC
CGGAGCCCCGCCCAGATCCTGATCAGCCTGGAGAGCGAGGAGCGG
GGCGAGCTGGAGCGGATCCTGGCCGACCTGGAGGAGGAGAACCGG
AACCTGCAGGCCGAGTACGACCGGCTGAAGCAGCAGCACGAGCAC
AAGGGCCTGAGCCCCCTGCCCAGCCCCCCCGAGATGATGCCCACC
AGCCCCCAGAGCCCC
UtrophinNterm-R2_DystrophinR17_R21-R22_
H4-trCterm + SynBS
Human sequence without codon alterations:
(SEQ ID NO: 184)
ATGGCCAAGTATGGAGAACATGAAGCCAGTCCTGACAATGGGCAG
AACGAATTCAGTGATATCATTAAGTCCAGATCTGATGAACACAAT
GACGTACAGAAGAAAACCTTTACCAAATGGATAAATGCTCGATTT
TCAAAGAGTGGGAAACCACCCATCAATGATATGTTCACAGACCTC
AAAGATGGAAGGAAGCTATTGGATCTTCTAGAAGGCCTCACAGGA
ACATCACTGCCAAAGGAACGTGGTTCCACAAGGGTACATGCCTTA
AATAACGTCAACAGAGTGCTGCAGGTTTTACATCAGAACAATGTG
GAATTAGTGAATATAGGGGGAACTGACATTGTGGATGGAAATCAC
AAACTGACTTTGGGGTTACTTTGGAGCATCATTTTGCACTGGCAG
GTGAAAGATGTCATGAAGGATGTCATGTCGGACCTGCAGCAGACG
AACAGTGAGAAGATCCTGCTCAGCTGGGTGCGTCAGACCACCAGG
CCCTACAGCCAAGTCAACGTCCTCAACTTCACCACCAGCTGGACA
GATGGACTCGCCTTTAATGCTGTCCTCCACCGACATAAACCTGAT
CTCTTCAGCTGGGATAAAGTTGTCAAAATGTCACCAATTGAGAGA
CTTGAACATGCCTTCAGCAAGGCTCAAACTTATTTGGGAATTGAA
AAGCTGTTAGATCCTGAAGATGTTGCCGTTCAGCTTCCTGACAAG
AAATCCATAATTATGTATTTAACATCTTTGTTTGAGGTGCTACCT
CAGCAAGTCACCATAGACGCCATCCGTGAGGTAGAGACACTCCCA
AGGAAATATAAAAAAGAATGTGAAGAAGAGGCAATTAATATACAG
AGTACAGCGCCTGAGGAGGAGCATGAGAGTCCCCGAGCTGAAACT
CCCAGCACTGTCACTGAGGTTGACATGGATCTGGACAGCTATCAG
ATTGCGTTGGAGGAAGTGCTGACCTGGTTGCTTTCTGCTGAGGAC
ACTTTCCAGGAGCAGGATGATATTTCTGATGATGTTGAAGAAGTC
AAAGACCAGTTTGCAACCCATGAAGCTTTTATGATGGAACTGACT
GCACACCAGAGCAGTGTGGGCAGCGTCCTGCAGGCAGGCAACCAA
CTGATAACACAAGGAACTCTGTCAGACGAAGAAGAATTTGAGATT
CAGGAACAGATGACCCTGCTGAATGCTAGATGGGAGGCTCTTAGG
GTGGAGAGTATGGACAGACAGTCCCGGCTGCACGATGTGCTGATG
GAACTGCAGAAGAAGCAACTGCAGCAGCTCTCCGCCTGGTTAACA
CTCACAGAGGAGCGCATTCAGAAGATGGAAACTTGCCCCCTGGAT
GATGATGTAAAATCTCTACAAAAGCTGCTAGAAGAACATAAAAGT
TTGCAAAGTGATCTTGAGGCTGAACAGGTGAAAGTAAATTCACTA
ACTCACATGGTGGTCATTGTTGATGAAAACAGTGGTGAGAGTGCT
ACAGCTATCCTAGAAGACCAGTTACAGAAACTTGGTGAGCGCTGG
ACAGCAGTATGCCGTTGGACTGAAGAACGCTGGAATAGGTTACAA
GAAATCGCCGCTAGCGCCCGATTTGACAGATCTGTTGAGAAATGG
CGGCGTTTTCATTATGATATAAAGATATTTAATCAGTGGCTAACA
GAAGCTGAACAGTTTCTCAGAAAGACACAAATTCCTGAGAATTGG
GAACATGCTAAATACAAATGGTATCTTAAGGAACTCCAGGATGGC
ATTGGGCAGCGGCAAACTGTTGTCAGAACATTGAATGCAACTGGG
GAAGAAATAATTCAGCAATCCTCAAAAACAGATGCCAGTATTCTA
CAGGAAAAATTGGGAAGCCTGAATCTGCGGTGGCAGGAGGTCTGC
AAACAGCTGTCAGACAGAAAAAAGAGGCTAGAAGAACAAAAGAAG
GATTCAACACAATGGCTGGAAGCTAAGGAAGAAGCTGAGCAGGTC
TTAGGACAGGCCAGAGCCAAGCTTGAGTCATGGAAGGAGGGTCCC
TATACAGTAGATGCAATCCAAAAGAAAATCACAGAAACCAAGCAG
TTGGCCAAAGACCTCCGCCAGTGGCAGACAAATGTAGATGTGGCA
AATGACTTGGCCCTGAAACTTCTCCGGGATTATTCTGCAGATGAT
ACCAGAAAAGTCCACATGATAACAGAGAATATCAATGCCTCTTGG
AGAAGCATTCATAAAAGGGTGAGTGAGCGAGAGGCTGCTTTGGAA
GAAACTCATAGATTACTGCAACAGTTCCCCCTGGACCTGGAAAAG
TTTCTTGCCTGGCTTACAGAAGCTGAAACAACTGCCAATGTCCTA
CAGGATGCTACCCGTAAGGAAAGGCTCCTAGAAGACTCCAAGGGA
GTAAAAGAGCTGATGAAACAATGGCAAGACCTCCAAGGTGAAATT
GAAGCTCACACAGATGTTTATCACAACCTGGATGAAAACAGCCAA
AAAATCCTGAGATCCCTGGAAGGTTCCGATGATGCAGTCCTGTTA
CAAAGACGTTTGGATAACATGAACTTCAAGTGGAGTGAACTTCGG
AAAAAGTCTCTCAACATTAGGTCCCATTTGGAAGCCAGTTCTGAC
CAGTGGAAGCGTCTGGGTCCAGCATCTCAGCACTTTCTTTCCACG
TCTGTCCAGGGTCCCTGGGAGAGAGCCATCTCGCCAAACAAAGTG
CCCTACTATATCAACCACGAGACTCAAACAACTTGCTGGGACCAT
CCCAAAATGACAGAGCTCTACCAGTCTTTAGCTGACCTGAATAAT
GTCAGATTCTCAGCTTATAGGACTGCCATGAAACTCCGAAGACTG
CAGAAGGCCCTTTGCTTGGATCTCTTGAGCCTGTCAGCTGCATGT
GATGCCTTGGACCAGCACAACCTCAAGCAAAATGACCAGCCCATG
GATATCCTGCAGATTATTAATTGTTTGACCACTATTTATGACCGC
CTGGAGCAAGAGCACAACAATTTGGTCAACGTCCCTCTCTGCGTG
GATATGTGTCTGAACTGGCTGCTGAATGTTTATGATACGGGACGA
ACAGGGAGGATCCGTGTCCTGTCTTTTAAAACTGGCATCATTTCC
CTGTGTAAAGCACATTTGGAAGACAAGTACAGATACCTTTTCAAG
CAAGTGGCAAGTTCAACAGGATTTTGTGACCAGCGCAGGCTGGGC
CTCCTTCTGCATGATTCTATCCAAATTCCAAGACAGTTGGGTGAA
GTTGCATCCTTTGGGGGCAGTAACATTGAGCCAAGTGTCCGGAGC
TGCTTCCAATTTGCTAATAATAAGCCAGAGATCGAAGCGGCCCTC
TTCCTAGACTGGATGAGACTGGAACCCCAGTCCATGGTGTGGCTG
CCCGTCCTGCACAGAGTGGCTGCTGCAGAAACTGCCAAGCATCAG
GCCAAATGTAACATCTGCAAAGAGTGTCCAATCATTGGATTCAGG
TACAGGAGTCTAAAGCACTTTAATTATGACATCTGCCAAAGCTGC
TTTTTTTCTGGTCGAGTTGCAAAAGGCCATAAAATGCACTATCCC
ATGGTGGAATATTGCACTCCGACTACATCAGGAGAAGATGTTCGA
GACTTTGCCAAGGTACTAAAAAACAAATTTCGAACCAAAAGGTAT
TTTGCGAAGCATCCCCGAATGGGCTACCTGCCAGTGCAGACTGTC
TTAGAGGGGGACAACATGGAAACTCCCGTTACTCTGATCAACTTC
TGGCCAGTAGATTCTGCGCCTGCCTCGTCCCCTCAGCTTTCACAC
GATGATACTCATTCACGCATTGAACATTATGCTAGCAGGCTAGCA
GAAATGGAAAACAGCAATGGATCTTATCTAAATGATAGCATCTCT
CCTAATGAGAGCATAGATGATGAACATTTGTTAATCCAGCATTAC
TGCCAAAGTTTGAACCAGGACTCCCCCCTGAGCCAGCCTCGTAGT
Human sequence with codon optimization:
(SEQ ID NO: 185)
ATGGCCAAGTACGGCGAGCACGAGGCCAGCCCCGACAACGGCCAG
AACGAGTTCAGCGACATCATCAAGAGCCGGAGCGACGAGCACAAC
GACGTGCAGAAGAAGACCTTCACCAAGTGGATCAACGCCCGGTTC
AGCAAGAGCGGCAAGCCCCCCATCAACGACATGTTCACCGACCTG
AAGGACGGCCGGAAGCTGCTGGACCTGCTGGAGGGCCTGACCGGC
ACCAGCCTGCCCAAGGAGCGGGGCAGCACCCGGGTGCACGCCCTG
AACAACGTGAACCGGGTGCTGCAGGTGCTGCACCAGAACAACGTG
GAGCTGGTGAACATCGGCGGCACCGACATCGTGGACGGCAACCAC
AAGCTGACCCTGGGCCTGCTGTGGAGCATCATCCTGCACTGGCAG
GTGAAGGACGTGATGAAGGACGTGATGAGCGACCTGCAGCAGACC
AACAGCGAGAAGATCCTGCTGAGCTGGGTGCGGCAGACCACCCGG
CCCTACAGCCAGGTGAACGTGCTGAACTTCACCACCAGCTGGACC
GACGGCCTGGCCTTCAACGCCGTGCTGCACCGGCACAAGCCCGAC
CTGTTCAGCTGGGACAAGGTGGTGAAGATGAGCCCCATCGAGCGG
CTGGAGCACGCCTTCAGCAAGGCCCAGACCTACCTGGGCATCGAG
AAGCTGCTGGACCCCGAGGACGTGGCCGTGCAGCTGCCCGACAAG
AAGAGCATCATCATGTACCTGACCAGCCTGTTCGAGGTGCTGCCC
CAGCAGGTGACCATCGACGCCATCCGGGAGGTGGAGACCCTGCCC
CGGAAGTACAAGAAGGAGTGCGAGGAGGAGGCCATCAACATCCAG
AGCACCGCCCCCGAGGAGGAGCACGAGAGCCCCCGGGCCGAGACC
CCCAGCACCGTGACCGAGGTGGACATGGACCTGGACAGCTACCAG
ATCGCCCTGGAGGAGGTGCTGACCTGGCTGCTGAGCGCCGAGGAC
ACCTTCCAGGAGCAGGACGACATCAGCGACGACGTGGAGGAGGTG
AAGGACCAGTTCGCCACCCACGAGGCCTTCATGATGGAGCTGACC
GCCCACCAGAGCAGCGTGGGCAGCGTGCTGCAGGCCGGCAACCAG
CTGATCACCCAGGGCACCCTGAGCGACGAGGAGGAGTTCGAGATC
CAGGAGCAGATGACCCTGCTGAACGCCCGGTGGGAGGCCCTGCGG
GTGGAGAGCATGGACCGGCAGAGCCGGCTGCACGACGTGCTGATG
GAGCTGCAGAAGAAGCAGCTGCAGCAGCTGAGCGCCTGGCTGACC
CTGACCGAGGAGCGGATCCAGAAGATGGAGACCTGCCCCCTGGAC
GACGACGTGAAGAGCCTGCAGAAGCTGCTGGAGGAGCACAAGAGC
CTGCAGAGCGACCTGGAGGCCGAGCAGGTGAAGGTGAACAGCCTG
ACCCACATGGTGGTGATCGTGGACGAGAACAGCGGCGAGAGCGCC
ACCGCCATCCTGGAGGACCAGCTGCAGAAGCTGGGCGAGCGGTGG
ACCGCCGTGTGCCGGTGGACCGAGGAGCGGTGGAACCGGCTGCAG
GAGATCGCCGCTAGCGCCCGGTTCGACCGGAGCGTGGAGAAGTGG
CGGCGGTTCCACTACGACATCAAGATCTTCAACCAGTGGCTGACC
GAGGCCGAGCAGTTCCTGCGGAAGACCCAGATCCCCGAGAACTGG
GAGCACGCCAAGTACAAGTGGTACCTGAAGGAGCTGCAGGACGGC
ATCGGCCAGCGGCAGACCGTGGTGCGGACCCTGAACGCCACCGGC
GAGGAGATCATCCAGCAGAGCAGCAAGACCGACGCCAGCATCCTG
CAGGAGAAGCTGGGCAGCCTGAACCTGCGGTGGCAGGAGGTGTGC
AAGCAGCTGAGCGACCGGAAGAAGCGGCTGGAGGAGCAGAAGAAG
GACAGCACCCAGTGGCTGGAGGCCAAGGAGGAGGCCGAGCAGGTG
CTGGGCCAGGCCCGGGCCAAGCTGGAGAGCTGGAAGGAGGGCCCC
TACACCGTGGACGCCATCCAGAAGAAGATCACCGAGACCAAGCAG
CTGGCCAAGGACCTGCGGCAGTGGCAGACCAACGTGGACGTGGCC
AACGACCTGGCCCTGAAGCTGCTGCGGGACTACAGCGCCGACGAC
ACCCGGAAGGTGCACATGATCACCGAGAACATCAACGCCAGCTGG
CGGAGCATCCACAAGCGGGTGAGCGAGCGGGAGGCCGCCCTGGAG
GAGACCCACCGGCTGCTGCAGCAGTTCCCCCTGGACCTGGAGAAG
TTCCTGGCCTGGCTGACCGAGGCCGAGACCACCGCCAACGTGCTG
CAGGACGCCACCCGGAAGGAGCGGCTGCTGGAGGACAGCAAGGGC
GTGAAGGAGCTGATGAAGCAGTGGCAGGACCTGCAGGGCGAGATC
GAGGCCCACACCGACGTGTACCACAACCTGGACGAGAACAGCCAG
AAGATCCTGCGGAGCCTGGAGGGCAGCGACGACGCCGTGCTGCTG
CAGCGGCGGCTGGACAACATGAACTTCAAGTGGAGCGAGCTGCGG
AAGAAGAGCCTGAACATCCGGAGCCACCTGGAGGCCAGCAGCGAC
CAGTGGAAGCGGCTGGGCCCCGCCAGCCAGCACTTCCTGAGCACC
AGCGTGCAGGGCCCCTGGGAGCGGGCCATCAGCCCCAACAAGGTG
CCCTACTACATCAACCACGAGACCCAGACCACCTGCTGGGACCAC
CCCAAGATGACCGAGCTGTACCAGAGCCTGGCCGACCTGAACAAC
GTGCGGTTCAGCGCCTACCGGACCGCCATGAAGCTGCGGCGGCTG
CAGAAGGCCCTGTGCCTGGACCTGCTGAGCCTGAGCGCCGCCTGC
GACGCCCTGGACCAGCACAACCTGAAGCAGAACGACCAGCCCATG
GACATCCTGCAGATCATCAACTGCCTGACCACCATCTACGACCGG
CTGGAGCAGGAGCACAACAACCTGGTGAACGTGCCCCTGTGCGTG
GACATGTGCCTGAACTGGCTGCTGAACGTGTACGACACCGGCCGG
ACCGGCCGGATCCGGGTGCTGAGCTTCAAGACCGGCATCATCAGC
CTGTGCAAGGCCCACCTGGAGGACAAGTACCGGTACCTGTTCAAG
CAGGTGGCCAGCAGCACCGGCTTCTGCGACCAGCGGCGGCTGGGC
CTGCTGCTGCACGACAGCATCCAGATCCCCCGGCAGCTGGGCGAG
GTGGCCAGCTTCGGCGGCAGCAACATCGAGCCCAGCGTGCGGAGC
TGCTTCCAGTTCGCCAACAACAAGCCCGAGATCGAGGCCGCCCTG
TTCCTGGACTGGATGCGGCTGGAGCCCCAGAGCATGGTGTGGCTG
CCCGTGCTGCACCGGGTGGCCGCCGCCGAGACCGCCAAGCACCAG
GCCAAGTGCAACATCTGCAAGGAGTGCCCCATCATCGGCTTCCGG
TACCGGAGCCTGAAGCACTTCAACTACGACATCTGCCAGAGCTGC
TTCTTCAGCGGCCGGGTGGCCAAGGGCCACAAGATGCACTACCCC
ATGGTGGAGTACTGCACCCCCACCACCAGCGGCGAGGACGTGCGG
GACTTCGCCAAGGTGCTGAAGAACAAGTTCCGGACCAAGCGGTAC
TTCGCCAAGCACCCCCGGATGGGCTACCTGCCCGTGCAGACCGTG
CTGGAGGGCGACAACATGGAGACCCCCGTGACCCTGATCAACTTC
TGGCCCGTGGACAGCGCCCCCGCCAGCAGCCCCCAGCTGAGCCAC
GACGACACCCACAGCCGGATCGAGCACTACGCCAGCCGGCTGGCC
GAGATGGAGAACAGCAACGGCAGCTACCTGAACGACAGCATCAGC
CCCAACGAGAGCATCGACGACGAGCACCTGCTGATCCAGCACTAC
TGCCAGAGCCTGAACCAGGACAGCCCCCTGAGCCAGCCCCGGAGC

[0126] In some embodiments, the present disclosure provides proteins that are variants of any one of SEQ ID Nos. 156-165. Variant polypeptides include polypeptides that differ by one or more (e.g., 1, 2, 3, 4, 5, 6, 7, 8, 9, 10, 11, 12, 13, 14, 15, 16, 17, 18, 19, 20, or more) amino acid substitutions, additions, or deletions, and will, therefore, include amino acid sequences that differ from the amino acid sequences designated in any one of SEQ ID Nos. 156-165.

[0127] In some embodiments, the present disclosure provides proteins comprising an amino acid sequence that is at least 65%, at least 68%, at least 70%, at least 75%, at least 80%, at least 85%, at least 90%, at least 91%, at least 92%, at least 93%, at least 94%, at least 95%, at least 96%, at least 97%, at least 98%, at least 99%, or 100% identical to the amino acid sequence of any one of SEQ ID Nos. 156-165.

[0128] The “percent identity” of two amino acid sequences or nucleic acid sequences may be determined by any method known in the art. In some embodiments, the percent identity of two nucleic acid sequences is determined using the algorithm of Karlin and Altschul, Proc. Natl. Acad. Sci. USA 87:2264-68, 1990, modified as in Karlin and Altschul, Proc. Natl. Acad. Sci. USA 90:5873-77, 1993. Such an algorithm is incorporated into the NBLAST and XBLAST programs (version 2.0) of Altschul et al., J. Mol. Biol. 215:403-10, 1990. BLAST nucleotide searches can be performed with the NBLAST program, score=100, wordlength-12, to obtain guide sequences homologous to a target nucleic acid. Where gaps exist between two sequences, Gapped BLAST can be utilized as described in Altschul et al., Nucleic Acids Res. 25 (17): 3389-3402, 1997. When utilizing BLAST and Gapped BLAST programs, the default parameters of the respective programs (e.g., XBLAST and NBLAST) can be used.

[0129] For the purposes of comparing two or more amino acid sequences, the percentage of “sequence identity” between a first amino acid sequence and a second amino acid sequence (also referred to herein as “amino acid identity”) may be calculated by dividing [the number of amino acid residues in the first amino acid sequence that are identical to the amino acid residues at the corresponding positions in the second amino acid sequence] by [the total number of amino acid residues in the first amino acid sequence] and multiplying by [100%], in which each deletion, insertion, substitution or addition of an amino acid residue in the second amino acid sequence—compared to the first amino acid sequence—is considered as a difference at a single amino acid residue (position), e.g., as an “amino acid difference” as defined herein. Alternatively, the degree of sequence identity between two amino acid sequences may be calculated using a known computer algorithm (e.g., by the local homology algorithm of Smith and Waterman (1970) Adv. Appl. Math. 2: 482c, by the homology alignment algorithm of Needleman and Wunsch, J. Mol. Biol. (1970) 48:443, by the search for similarity method of Pearson and Lipman. Proc. Natl. Acad. Sci. USA (1998) 85:2444, or by computerized implementations of algorithms available as Blast, Clustal Omega, or other sequence alignment algorithms) and, for example, using standard settings. Usually, for the purpose of determining the percentage of “sequence identity” between two amino acid sequences in accordance with the calculation method outlined hereinabove, the amino acid sequence with the greatest number of amino acid residues will be taken as the “first” amino acid sequence, and the other amino acid sequence will be taken as the “second” amino acid sequence.

### Recombinant Nucleic Acids

[0130] The disclosure provides recombinant nucleic acids comprising a nucleotide sequence encoding a micro-dystrophin protein of the disclosure. In some embodiments, a micro-dystrophin protein as described herein further comprises one or more utrophin protein domains. A recombinant nucleic acid is a molecule that is constructed by joining nucleic acids (e.g., isolated nucleic acids, synthetic nucleic acids or a combination thereof) from multiple sources.

[0131] In some aspects, the present disclosure provides a recombinant nucleic acid comprising a nucleotide sequence encoding a micro-dystrophin protein as described herein. In some aspects, the present disclosure provides a recombinant nucleic acid comprising a nucleotide sequence encoding a chimeric protein comprising a dystrophin region (or domain) and a utrophin region (or domain). In some embodiments, the chimeric protein comprises a carboxy-terminal (also referred to herein as “C-terminal” or “C-terminus”) region of dystrophin coupled to an amino-terminal (also referred to herein as “N-terminal” or “N-terminus”) region of utrophin. In some aspects, the present disclosure provides a recombinant nucleic acid comprising a nucleotide sequence encoding a micro-dystrophin protein comprising a utrophin N-terminus. In some embodiments, the recombinant nucleic acid comprises a nucleotide sequence that is at least 70%, at least 75%, at least 80%, at least 85%, at least 90%, at least 91%, at least 92%, at least 93%, at least 94%, at least 95%, at least 96%, at least 97%, at least 98%, at least 99%, or 100% identical to the nucleotide sequence of any one of SEQ ID NOs: 7-12, and 22-39. In some embodiments, the recombinant nucleic acid comprises a nucleotide sequence that is at least 70%, at least 75%, at least 80%, at least 85%, at least 90%, at least 91%, at least 92%, at least 93%, at least 94%, at least 95%, at least 96%, at least 97%, at least 98%, at least 99%, or 100% identical to the nucleotide sequence of any one of SEQ ID NOs: 85-92, 126-131, and 133-134. In some embodiments, the recombinant nucleic acid comprises a nucleotide sequence that is at least 70%, at least 75%, at least 80%, at least 85%, at least 90%, at least 91%, at least 92%, at least 93%, at least 94%, at least 95%, at least 96%, at least 97%, at least 98%, at least 99%, or 100% identical to the nucleotide sequence of any one of SEQ ID NOs: 135-148. In some embodiments, the recombinant nucleic acid comprises a nucleotide sequence that is at least 70%, at least 75%, at least 80%, at least 85%, at least 90%, at least 91%, at least 92%, at least 93%, at least 94%, at least 95%, at least 96%, at least 97%, at least 98%, at least 99%, or 100% identical to the nucleotide sequence of any one of SEQ ID NOs: 166-185.

[0132] In some embodiments, the recombinant nucleic acid comprises a nucleotide sequence that is at least 80% identical to the nucleotide sequence of any one of SEQ ID NOs: 7-12, and 22-39. In some embodiments, the recombinant nucleic acid comprises a nucleotide sequence having 100% identity with the nucleotide sequence of any one of SEQ ID NOs: 7-12, and 22-39. In some embodiments, the recombinant nucleic acid comprises a nucleotide sequence that is at least 80% identical to the nucleotide sequence of any one of SEQ ID NOs: 85-92, 126-131, and 133-134. In some embodiments, the recombinant nucleic acid comprises a nucleotide sequence having 100% identity with the nucleotide sequence of any one of SEQ ID NOs: 85-92, 126-131, and 133-134. In some embodiments, the recombinant nucleic acid comprises a nucleotide sequence that is at least 80% identical to the nucleotide sequence of any one of SEQ ID NOs: 135-148. In some embodiments, the recombinant nucleic acid comprises a nucleotide sequence having 100% identity with the nucleotide sequence of any one of SEQ ID NOs: 135-148. In some embodiments, the recombinant nucleic acid comprises a nucleotide sequence that is at least 80% identical to the nucleotide sequence of any one of SEQ ID NOs: 166-185. In some embodiments, the recombinant nucleic acid comprises a nucleotide sequence having 100% identity with the nucleotide sequence of any one of SEQ ID NOs: 166-185.

[0133] A recombinant nucleic acid may comprise DNA (e.g., genomic DNA, cDNA or a combination of genomic DNA and cDNA), RNA or a hybrid molecule, for example, where the nucleic acid contains any combination of deoxyribonucleotides and ribonucleotides (e.g., artificial or natural), and any combination of two or more bases, including uracil, adenine, thymine, cytosine, guanine, inosine, xanthine, hypoxanthine, isocytosine and isoguanine.

[0134] Recombinant nucleic acids of the present disclosure may be produced using standard molecular biology methods (see, e.g., Green and Sambrook, Molecular Cloning, A Laboratory Manual, 2012, Cold Spring Harbor Press). In some embodiments, nucleic acids are produced using GIBSON ASSEMBLY® Cloning (see, e.g., Gibson, D. G. et al. Nature Methods, 343-345, 2009; and Gibson, D. G. et al. Nature Methods, 901-903, 2010, each of which is incorporated by reference herein). GIBSON ASSEMBLY® typically uses three enzymatic activities in a single-tube reaction: 5′ exonuclease, the 3′extension activity of a DNA polymerase and DNA ligase activity. The 5′ exonuclease activity chews back the 5′ end sequences and exposes the complementary sequence for annealing. The polymerase activity then fills in the gaps on the annealed domains. A DNA ligase then seals the nick and covalently links the DNA fragments together. The overlapping sequence of adjoining fragments is much longer than those used in Golden Gate Assembly, and therefore results in a higher percentage of correct assemblies. Other methods of producing engineered nucleic acids may be used in accordance with the present disclosure.

[0135] Expression of the micro-dystrophin protein may be controlled using one or more regulatory sequences such as enhancers and promoters, operably linked to the nucleotide sequences encoding the micro-dystrophin protein.

[0136] A “promoter”, as used herein, refers to a control region of a nucleic acid at which initiation and rate of transcription of the remainder of a nucleic acid sequence are controlled. A promoter drives transcription of the nucleic acid sequence that it regulates, thus, it is typically located at or near the transcriptional start site of a gene. A promoter may have, for example, a length of 100 to 1000 nucleotides. In some embodiments, a promoter is operably linked to a nucleic acid, or a sequence of a nucleic acid (nucleotide sequence). A promoter is considered to be “operably linked” to a sequence of nucleic acid that it regulates when the promoter is in a correct functional location and orientation relative to the sequence such that the promoter regulates (e.g., to control (“drive”) transcriptional initiation and/or expression of) that sequence.

[0137] Promoters that may be used in accordance with the present disclosure may comprise any suitable promoter that can drive the expression of the nucleotide sequences encoding the micro-dystrophin proteins.

[0138] In some embodiments, a promoter is operably linked to the nucleotide sequence encoding the micro-dystrophin protein. In some embodiments, the recombinant nucleic acid comprising a nucleotide sequence encoding a micro-dystrophin protein as described herein, also comprises a nucleotide sequence encoding a region of a utrophin protein. In some embodiments, a promoter is operably linked to the nucleotide sequence encoding the region of utrophin protein.

[0139] In some embodiments, a promoter is naturally associated with dystrophin, and may be obtained by isolating the 5′ non-coding sequence upstream of the coding segment and/or exon of dystrophin. Such a promoter may be referred to as an endogenous promoter or a native promoter. In some embodiments, the promoter of any of the disclosed nucleic acid molecules or constructs is an endogenous promoter, such as a dystrophin promoter. In some embodiments, the promoter of any of the disclosed nucleic acid molecules or constructs is an exogenous promoter.

[0140] In some embodiments, the promoter is a chimeric promoter comprising sequence elements from two or more different promoters.

[0141] In some embodiments, the promoter is a constitutively active promoter. Constitutive promoters include any constitutive promoter described herein or known to one of ordinary skill in the art. Non-limiting examples of constitutive promoters include the immediate early cytomegalovirus (CMV) promoter, the simian virus 40 (SV40) early promoter, mouse mammary tumor virus (MMTV), human immunodeficiency virus (HIV) long terminal repeat (LTR) promoter, MoMuLV promoter, an avian leukemia virus promoter, an Epstein-Barr virus immediate early promoter, a Rous sarcoma virus promoter, as well as mammalian gene promoters such as, but not limited to, the elongation Factor-la (EF-la) the actin promoter, the myosin promoter, the hemoglobin promoter, and the creatine kinase promoter.

[0142] Inducible promoters are also contemplated herein. An “inducible promoter” refers to a promoter that is characterized by regulating (e.g., initiating or activating) transcriptional activity when in the presence of, influenced by or contacted by an inducer signal.

[0143] In some embodiments, the promoter is a tissue-specific promoter. A “tissue-specific promoter”, as used herein, refers to promoters that preferentially or selectively function in a specific type of tissue. In some embodiments, a tissue-specific promoter is not able to drive the expression of the genes in other types of tissues. In some embodiments, a promoter that may be used in accordance with the present disclosure is a skeletal muscle-specific promoter. In some embodiments, the skeletal muscle-specific promoter is the CK6 promoter, CK8 promoter, or skeletal α-actin promoter. In some embodiments, the skeletal muscle-specific promoter comprises a nucleotide sequence that is at least 70%, at least 75%, at least 80%, at least 85%, at least 90%, at least 91%, at least 92%, at least 93%, at least 94%, at least 95%, at least 96%, at least 97%, at least 98%, at least 99%, or 100% identical to the nucleotide sequence of SEQ ID NO: 78 or SEQ ID NO: 80. In some embodiments, a promoter that may be used in accordance with the present disclosure is a cardiac-specific promoter. In some embodiments, the cardiac-specific promoter is the cardiac troponin C promoter, the cardiac troponin I promoter, or the cardiac troponin T (cTnT) promoter. In some embodiments, the cardiac-specific promoter is the cTnT promoter.

[0144] In some embodiments, the engineered nucleic acids of the present disclosure further comprise one or more enhancer elements. In some embodiments, an enhancer element is a skeletal muscle alpha-actin enhancer. In some embodiments, the promoter is a skeletal muscle-specific promoter with skeletal muscle alpha-actin enhancer elements.

[0145] In some embodiments, the recombinant nucleic acids of the present disclosure further comprise additional regulatory sequences, including, without limitation, a 3′ untranslated region (3′UTR), and/or a poly-adenylation (polyA) signal sequence.

[0146] In some embodiments, a nucleotide sequence encoding a micro-dystrophin protein optimized for cardiac muscle is operably linked to a cardiac-specific promoter. In some embodiments, a nucleotide sequence encoding a micro-dystrophin protein optimized for skeletal muscle is operably linked to a skeletal muscle-specific promoter. In some embodiments, a nucleotide sequence encoding a micro-dystrophin protein optimized for cardiac muscle is operably linked to a weaker promoter. In some embodiments, the expression of a micro-dystrophin protein optimized for cardiac muscle is 5%, 10%, 155, 20%, 25%, 30%, 35%, 40%, 45%, or 50% lower than the expression of a micro-dystrophin protein optimized for skeletal muscle.

### Skeletal Muscle-Specific Promoter

[0147] In one aspect, the present disclosure provides minimal skeletal muscle-specific promoters based on the skeletal alpha-actin promoter. In some embodiments, a skeletal muscle-specific promoter of the disclosure does not comprise any element that mediates a response in cardiac muscle.

[0148] In some embodiments, a skeletal muscle-specific promoter of the disclosure is less than about 600 bp in length. In some embodiments, the skeletal muscle-specific promoter is less than about 550 bp in length. In some embodiments, the skeletal muscle-specific promoter is less than about 500 bp in length. In some embodiments, the skeletal muscle-specific promoter is less than about 400 bp in length.

[0149] In some embodiments, a skeletal muscle-specific promoter of the disclosure comprises one or more (e.g., 1, 2, 3, or more) copies of the skeletal muscle alpha-actin enhancer. In some embodiments, a skeletal muscle-specific promoter of the disclosure comprises one or more (e.g., 1, 2, 3, or more) copies of an enhancer that comprises a nucleotide sequence that is at least 70%, at least 75%, at least 80%, at least 85%, at least 90%, at least 91%, at least 92%, at least 93%, at least 94%, at least 95%, at least 96%, at least 97%, at least 98%, at least 99%, or 100% identical to nucleotides 8-106 of SEQ ID NO: 76. In some embodiments, the skeletal alpha-actin enhancer comprises nucleotides 8-106 of SEQ ID NO: 76. In some embodiments, the skeletal alpha-actin enhancer consists essentially of nucleotides 8-106 of SEQ ID NO: 76. In some embodiments, the skeletal alpha-actin enhancer consists of nucleotides 8-106 of SEQ ID NO: 76. In some embodiments, a skeletal muscle-specific promoter of the disclosure comprises one or more (e.g., 1, 2, 3, or more) copies of an enhancer that comprises a nucleotide sequence that is at least 70%, at least 75%, at least 80%, at least 85%, at least 90%, at least 91%, at least 92%, at least 93%, at least 94%, at least 95%, at least 96%, at least 97%, at least 98%, at least 99%, or 100% identical to SEQ ID NO: 76. In some embodiments, the skeletal alpha-actin enhancer comprises SEQ ID NO: 76. In some embodiments, the skeletal alpha-actin enhancer consists essentially of SEQ ID NO: 76. In some embodiments, the skeletal alpha-actin enhancer consists of SEQ ID NO: 76.

[0150] In some embodiments, a skeletal muscle-specific promoter of the disclosure comprises two copies of the skeletal muscle alpha-actin enhancer. In some embodiments, a skeletal muscle-specific promoter of the disclosure comprises a nucleotide sequence that is at least 70%, at least 75%, at least 80%, at least 85%, at least 90%, at least 91%, at least 92%, at least 93%, at least 94%, at least 95%, at least 96%, at least 97%, at least 98%, at least 99%, or 100% identical to nucleotides 8-205 of SEQ ID NO: 79. In some embodiments, the skeletal alpha-actin enhancer comprises nucleotides 8-205 of SEQ ID NO: 79. In some embodiments, the skeletal alpha-actin enhancer consists essentially of nucleotides 8-205 of SEQ ID NO: 79. In some embodiments, the skeletal alpha-actin enhancer consists of nucleotides 8-205 of SEQ ID NO: 79. In some embodiments, a skeletal muscle-specific promoter of the disclosure comprises an enhancer that comprises a nucleotide sequence that is at least 70%, at least 75%, at least 80%, at least 85%, at least 90%, at least 91%, at least 92%, at least 93%, at least 94%, at least 95%, at least 96%, at least 97%, at least 98%, at least 99%, or 100% identical to the nucleotide sequence of SEQ ID NO: 79. In some embodiments, a skeletal muscle-specific promoter of the disclosure comprises an enhancer that consists essentially of a nucleotide sequence that is at least 70%, at least 75%, at least 80%, at least 85%, at least 90%, at least 91%, at least 92%, at least 93%, at least 94%, at least 95%, at least 96%, at least 97%, at least 98%, at least 99%, or 100% identical to the nucleotide sequence of SEQ ID NO: 79. In some embodiments, a skeletal muscle-specific promoter of the disclosure comprises an enhancer that consists of a nucleotide sequence that is at least 70%, at least 75%, at least 80%, at least 85%, at least 90%, at least 91%, at least 92%, at least 93%, at least 94%, at least 95%, at least 96%, at least 97%, at least 98%, at least 99%, or 100% identical to the nucleotide sequence of SEQ ID NO: 79.

[0151] In some embodiments, a skeletal muscle-specific promoter of the disclosure comprises a core promoter sequence that comprises a nucleotide sequence that is at least 70%, at least 75%, at least 80%, at least 85%, at least 90%, at least 91%, at least 92%, at least 93%, at least 94%, at least 95%, at least 96%, at least 97%, at least 98%, at least 99%, or 100% identical to nucleotides 1-274 of SEQ ID NO: 77. In some embodiments, the core promoter sequence comprises nucleotides 1-274 of SEQ ID NO: 77. In some embodiments, the core promoter sequence consists essentially of nucleotides 1-274 of SEQ ID NO: 77. In some embodiments, the core promoter sequence consists of nucleotides 1-274 of SEQ ID NO: 77. In some embodiments, a skeletal muscle-specific promoter of the disclosure comprises a core promoter sequence plus Kozak consensus sequence that comprises a nucleotide sequence that is at least 70%, at least 75%, at least 80%, at least 85%, at least 90%, at least 91%, at least 92%, at least 93%, at least 94%, at least 95%, at least 96%, at least 97%, at least 98%, at least 99%, or 100% identical to SEQ ID NO: 77. In some embodiments, the core promoter sequence plus Kozak consensus sequence comprises SEQ ID NO: 77. In some embodiments, the core promoter sequence plus a Kozak consensus sequence consists essentially of SEQ ID NO: 77. In some embodiments, the core promoter sequence plus a Kozak consensus sequence consists of SEQ ID NO: 77.

[0152] In some embodiments, a skeletal muscle-specific promoter of the disclosure comprises a nucleotide sequence that is at least 70%, at least 75%, at least 80%, at least 85%, at least 90%, at least 91%, at least 92%, at least 93%, at least 94%, at least 95%, at least 96%, at least 97%, at least 98%, at least 99%, or 100% identical to the nucleotide sequence of SEQ ID NO: 78 or SEQ ID NO: 80. In some embodiments, a skeletal muscle-specific promoter of the disclosure consists essentially of a nucleotide sequence that is at least 70%, at least 75%, at least 80%, at least 85%, at least 90%, at least 91%, at least 92%, at least 93%, at least 94%, at least 95%, at least 96%, at least 97%, at least 98%, at least 99%, or 100% identical to the nucleotide sequence of SEQ ID NO: 78 or SEQ ID NO: 80. In some embodiments, a skeletal muscle-specific promoter of the disclosure consists of a nucleotide sequence that is at least 70%, at least 75%, at least 80%, at least 85%, at least 90%, at least 91%, at least 92%, at least 93%, at least 94%, at least 95%, at least 96%, at least 97%, at least 98%, at least 99%, or 100% identical to the nucleotide sequence of SEQ ID NO: 78 or SEQ ID NO: 80. In some embodiments, a skeletal muscle-specific promoter of the disclosure comprises the nucleotide sequence of SEQ ID NO: 78 or SEQ ID NO: 80. In some embodiments, a skeletal muscle-specific promoter of the disclosure consists essentially of the nucleotide sequence of SEQ ID NO: 78 or SEQ ID NO: 80. In some embodiments, a skeletal muscle-specific promoter of the disclosure consists of the nucleotide sequence of SEQ ID NO: 78 or SEQ ID NO: 80.

[0153] A skeletal muscle-specific promoter of the disclosure may be used to express any gene of interest in skeletal muscle. Thus, a skeletal muscle-specific promoter of the disclosure may be operably linked to any gene of interest, to express the gene of interest in skeletal muscle. In some embodiments, the gene of interest is a micro-dystrophin gene of the disclosure.

[0154] A skeletal muscle-specific promoter of the disclosure may be used may be used for gene therapy for skeletal muscle disorders. In some embodiments, the skeletal muscle disorder is a muscular dystrophy. In some embodiments, the muscular dystrophy is DMD.

### Vectors

[0155] In some aspects, the present disclosure provides vectors comprising the recombinant nucleic acids described herein. A vector is any nucleic acid that may be used as a vehicle to deliver exogenous (foreign) genetic material to a cell. A vector, in some embodiments, is a DNA sequence that includes an insert (e.g., a nucleotide sequence encoding a micro-dystrophin protein and a larger sequence that serves as the backbone of the vector. Non-limiting examples of vectors include plasmids, viruses/viral vectors, phagemids, cosmids (comprising a plasmid and Lambda phage cos sequences), and artificial chromosomes, any of which may be used as provided herein. In some embodiments, the vector is a viral vector, such as a viral particle. In some embodiments, the viral vector is an adenovirus, adeno associated virus (AAV), γ-retrovirus, HSV, lentivirus, or Sendai virus vector. In some embodiments, the viral vector is an recombinant AAV (rAAV) vector.

[0156] In some embodiments, a nucleic acid of the disclosure is flanked by AAV ITRs for packaging into an rAAV vector.

[0157] The phrase rAAV vector can include a rAAV genome comprising the gene of interest flanked by AAV ITRs, and an rAAV particle comprising an rAAV genome encapsidated with rAAV capsid proteins.

[0158] The ITR sequences may be derived from any AAV serotype (e.g., 1, 2, 3, 4, 5, 6, 7, 8, 9, or 10) or may be derived from more than one serotype. In some embodiments, the ITR sequences are the same serotype as the capsid (e.g., AAV8 ITR sequences and AAV8 capsid, etc.). In some embodiments, the ITR sequences are of a different serotype from the capsid.

[0159] ITR sequences and plasmids containing ITR sequences are known in the art and commercially available (see, e.g., products and services available from Vector Biolabs, Philadelphia, PA; Cellbiolabs, San Diego, CA; Agilent Technologies, Santa Clara, Ca; and Addgene, Cambridge, MA; and Gene delivery to skeletal muscle results in sustained expression and systemic delivery of a therapeutic protein. Kessler P D, et al. Proc Natl Acad Sci USA. 1996 Nov. 26; 93 (24): 14082-7; and Curtis A. Machida. Methods in Molecular Medicine™. Viral Vectors for Gene Therapy Methods and Protocols. 10.1385/1-59259-304-6:201 @ Humana Press Inc. 2003. Chapter 10. Targeted Integration by Adeno-Associated Virus. Matthew D. Weitzman, Samuel M. Young Jr., Toni Cathomen and Richard Jude Samulski; U.S. Pat. Nos. 5,139,941 and 5,962,313, all of which are incorporated herein by reference).

[0160] Further provided herein are rAAV viral particles or rAAV preparations containing such particles. The rAAV particles comprise a viral capsid and an rAAV genome comprising the gene of interest flanked by AAV ITRs, which is encapsidated by the viral capsid. Methods of producing rAAV particles are known in the art and are commercially available (see, e.g., Zolotukhin et al. Production and purification of serotype 1, 2, and 5 recombinant adeno-associated viral vectors. Methods 28 (2002) 158-167; and U.S. Patent Application Publication Numbers US 2007/0015238 and US 2012/0322861, which are incorporated herein by reference; and plasmids and kits available from ATCC and Cell Biolabs, Inc.). For example, a plasmid containing the rAAV genome comprising the gene of interest flanked by AAV ITRs may be combined with one or more helper plasmids, e.g., that contain a rep gene (e.g., encoding Rep78, Rep68, Rep52 and Rep40) and a cap gene (encoding VP1, VP2, and VP3, including a modified VP3 region as described herein), and transfected into a producer cell line such that the rAAV particle can be packaged and subsequently purified.

[0161] The rAAV particles or particles within an rAAV preparation disclosed herein, may be of any AAV serotype, including any derivative or pseudotype (e.g., 1, 2, 3, 4, 5, 6, 7, 8, 9, 10, 2/1, 2/5, 2/8, 2/9, 3/1, 3/5, 3/8, or 3/9). As used herein, the serotype of an rAAV an rAAV particle refers to the serotype of the capsid proteins of the recombinant virus. Non-limiting examples of derivatives and pseudotypes include AAVrh.10, AAVrh.74, AAV2/1, AAV2/5, AAV2/6, AAV2/8, AAV2/9, AAV2-AAV3 hybrid, AAVhu.14, AAV3a/3b, AAVrh32.33. AAV-HSC15, AAV-HSC17, AAVhu.37, AAVrh.8, CHt-P6, AAV2.5, AAV6.2, AAV2i8, AAV-HSC15/17, AAVM41, AAV9.45, AAV6 (Y445F/Y731F), AAV2.5T. AAV-HAE1/2, AAV clone 32/83, AAVShH10, AAV2 (Y->F), AAV8 (Y733F), AAV2.15, AAV2.4, AAVM41, and AAVr3.45. Such AAV serotypes and derivatives/pseudotypes, and methods of producing such derivatives/pseudotypes are known in the art (see, e.g., Mol Ther. 2012 April; 20 (4): 699-708. doi: 10.1038/mt.2011.287. Epub 2012 Jan. 24. The AAV vector toolkit: poised at the clinical crossroads. Asokan A1, Schaffer D V, Samulski R J). Methods for producing and using pseudotyped rAAV vectors are known in the art (see, e.g., Duan et al., J. Virol., 75:7662-7671, 2001; Halbert et al., J. Virol., 74:1524-1532, 2000; Zolotukhin et al., Methods, 28:158-167, 2002; and Auricchio et al., Hum. Molec. Genet., 10:3075-3081, 2001). In some embodiments, the capsid of any of the herein disclosed rAAV particles is of the serotype AAV1, AAV2, AAV3, AAV6, AAV7, AAV8, AAVrh.74, AAVrh.10, AAV2/6 or AAV9.

[0162] In some embodiments, a nucleotide sequence encoding a micro-dystrophin protein optimized for cardiac muscle and a nucleotide sequence encoding a micro-dystrophin protein optimized for skeletal muscle are packaged in rAAV particles of the same serotype. In some embodiments, the micro-dystrophin protein comprises one or more utrophin protein domains.

[0163] In some embodiments, a nucleotide sequence encoding a micro-dystrophin protein optimized for cardiac muscle and a nucleotide sequence encoding a micro-dystrophin protein optimized for skeletal muscle are packaged in rAAV particles of different serotypes. In some embodiments, the micro-dystrophin protein comprises one or more utrophin protein domains.

[0164] In some embodiments, a nucleotide sequence encoding a micro-dystrophin protein optimized for cardiac muscle is packaged in an rAAV particle of the serotype AAV1, AAV8, AAV9, AAVrh.74, or AAVrh.10. In some embodiments, a nucleotide sequence encoding a micro-dystrophin protein optimized for cardiac muscle is packaged in an rAAV particle of the serotype AAV9, AAVrh.74, or AAVrh.10. In some embodiments, a nucleotide sequence encoding a micro-dystrophin protein optimized for skeletal muscle is packaged in an rAAV particle of the serotype AAV1, AAV6, AAV7, AAV8, or AAV9. In some embodiments, a nucleotide sequence encoding a micro-dystrophin protein optimized for skeletal muscle is packaged in an rAAV particle of the serotype AAV8. In some embodiments, the micro-dystrophin protein comprises one or more utrophin protein domains.

[0165] In some aspects, the methods described herein comprise expressing a micro-dystrophin protein in cardiac or skeletal muscle. The vectors provided herein may be used for gene therapy for treating skeletal muscle disorders in a subject in need thereof. In some embodiments, the vectors provided herein may be used for gene therapy for treating a muscular dystrophy (e.g., DMD) in a subject in need thereof.

### Methods of Use

[0166] In some aspects, the present disclosure provides methods of treating DMD.

[0167] In one aspect, the present disclosure provides a method of treating DMD in a subject in need thereof, comprising administering to the subject an effective amount of a micro-dystrophin protein of the disclosure. In some embodiments, the micro-dystrophin protein comprises one or more utrophin protein domains.

[0168] In another aspect, the present disclosure provides a gene therapy for treating DMD in a subject in need thereof. Accordingly, the present disclosure provides a method of treating DMD in a subject in need thereof, comprising administering to the subject an effective amount of a nucleic acid molecule encoding a micro-dystrophin protein. In some embodiments, the micro-dystrophin protein comprises one or more utrophin protein domains.

[0169] In some embodiments, the present disclosure provides a method of treating DMD in a subject in need thereof, comprising administering to the subject an effective amount of a nucleic acid molecule encoding a micro-dystrophin protein optimized for cardiac muscle and an effective amount of a nucleic acid molecule encoding a micro-dystrophin protein optimized for skeletal muscle. In some embodiments, the micro-dystrophin protein comprises one or more utrophin protein domains.

[0170] In some embodiments, the present disclosure provides a method of treating DMD in a subject in need thereof, comprising administering to the subject an effective amount of a nucleic acid molecule encoding a micro-dystrophin protein optimized for cardiac muscle to cardiac muscle and an effective amount of a nucleic acid molecule encoding a micro-dystrophin protein optimized for skeletal muscle to skeletal muscle. In some embodiments, the micro-dystrophin protein comprises one or more utrophin protein domains.

[0171] In some embodiments, the present disclosure provides a method of treating DMD in a subject in need thereof, the method comprising delivering to the subject a first gene therapy vector (e.g., a first rAAV particle) comprising a nucleotide sequence encoding a first micro-dystrophin protein to cardiac muscle and a second gene therapy vector (e.g., a second rAAV particle) comprising a nucleotide sequence encoding a second micro-dystrophin to skeletal muscle. In some embodiments, the first recombinant adeno-associated virus (rAAV) particle comprising a nucleotide sequence encoding a first micro-dystrophin protein to cardiac muscle also comprises a nucleotide sequence encoding a first utrophin protein region. In some embodiments, the second rAAV particle comprising a nucleotide sequence encoding a second micro-dystrophin to skeletal muscle also comprises a nucleotide sequence encoding a second utrophin protein region. In some embodiments, the first recombinant adeno-associated virus (rAAV) particle comprises a nucleotide sequence encoding a first chimeric protein comprising a first micro-dystrophin protein and a first utrophin protein region to cardiac muscle. In some embodiments, the second recombinant adeno-associated virus (rAAV) particle comprises a nucleotide sequence encoding a second chimeric protein comprising a second micro-dystrophin protein and a second utrophin protein region to skeletal muscle. In some embodiments, the first or second micro-dystrophin protein comprises one or more utrophin protein domains.

[0172] In some embodiments, methods are provided for transducing a cardiac muscle cell with the first rAAV particle of the disclosure. In some embodiments, methods are provided for transducing a skeletal muscle cell with the second rAAV particle of the disclosure. In some embodiments, methods are provided for transducing a cardiac muscle cell with any rAAV particle of the disclosure. In some embodiments, methods are provided for transducing a skeletal muscle cell with any rAAV particle of the disclosure.

[0173] The present disclosure thus contemplates methods of expressing one or more micro-dystrophin proteins in a subject for treating DMD, the method comprising administering to a subject in need thereof an effective amount of one or more nucleic acids of the disclosure.

[0174] In some embodiments, additional gene therapy approaches are combined with micro-dystrophin.

[0175] The terms “subject.” and “patient,” are used interchangeably herein. In some embodiments, a subject is a mammal, such as a human, a nonhuman primate, a dog, a cat, a horse, a sheep, a poultry, a cow, a pig, a mouse, a rat, a rodent, or a goat. In some embodiments, the subject and mammal is a human.

[0176] An “effective amount” of the compositions of the disclosure generally refers to an amount sufficient to elicit the desired biological response, e.g., express the micro-dystrophin protein in a target cell, treat DMD, etc. As will be appreciated by those of ordinary skill in this art, the effective amount of an agent described herein may vary depending on such factors as the condition being treated, the mode of administration, and the age, body composition, and health of the subject. Suitable dosage ranges are readily determinable by one skilled in the art.

[0177] The terms “treat”, “treating”, “treatment”, and “therapy” encompass an action that occurs while a subject is suffering from a condition which reduces the severity of the condition (or a symptom associated with the condition) or retards or slows the progression of the condition (or a symptom associated with the condition).

### Compositions

[0178] In some aspects, the present disclosure provides compositions comprising the polypeptides, nucleic acids, or vectors disclosed herein. For administration to a subject, the polypeptides, engineered nucleic acids, or vectors disclosed herein may be formulated in a composition. In some embodiments, the composition further comprises additional agents (e.g., for specific delivery, increasing half-life, or other therapeutic agents).

[0179] In some embodiments, the composition is a pharmaceutical composition. In some embodiments, the composition further comprises a pharmaceutically acceptable carrier. The term “pharmaceutically acceptable” refers to those compounds, materials, compositions, and/or dosage forms which are, within the scope of sound medical judgment, suitable for use in contact with the tissues of human beings and animals without excessive toxicity, irritation, allergic response, or other problem or complication, commensurate with a reasonable benefit/risk ratio. A “pharmaceutically acceptable carrier” is a pharmaceutically acceptable material, composition or vehicle, such as a liquid or solid filler, diluent, excipient, solvent or encapsulating material, involved in carrying or transporting the subject agents from one organ, or portion of the body, to another organ, or portion of the body. Each carrier must be “acceptable” in the sense of being compatible with the other ingredients of the formulation.

[0180] Nucleic acids, in some embodiments, may be formulated in a non-viral delivery vehicle. Non-limiting examples of non-viral delivery vehicles include nanoparticles, such as nanocapsules and nanospheres. Sec, e.g., Sing, R et al. Exp Mol Pathol. 2009; 86 (3): 215-223. A nanocapsule is often comprised of a polymeric shell encapsulating an agent. Nanospheres are often comprised of a solid polymeric matrix throughout which the agent is dispersed. In some embodiments, the nanoparticle is a lipid particle, such as a liposome. See, e.g., Puri, A et al. Crit Rev Ther Drug Carrier Syst. 2009; 26 (6): 523-80. The term ‘nanoparticle’ also encompasses microparticles, such as microcapsules and microspheres.

[0181] Methods developed for making particles for delivery of encapsulated agents are described in the literature (for example, please see Doubrow, M., Ed., “Microcapsules and Nanoparticles in Medicine and Pharmacy.” CRC Press, Boca Raton, 1992; Mathiowitz and Langer, J. Controlled Release 5:13-22, 1987; Mathiowitz et al. Reactive Polymers 6:275-283, 1987; Mathiowitz et al. J. Appl. Polymer Sci. 35:755-774, 1988; each of which is incorporated herein by reference).

[0182] General considerations in the formulation and/or manufacture of pharmaceutical agents, such as compositions comprising any of the engineered nucleic acids disclosed herein may be found, for example, in Remington's Pharmaceutical Sciences, 18th edition, Mack Publishing Co., Easton, Pa (1990) (incorporated herein by reference in its entirety).

### Methods of Administration

[0183] Any of the polypeptides, nucleic acids, vectors, or compositions disclosed herein may be administered to a subject.

[0184] Suitable routes of administration include, without limitation, intravenous, intranasal, intramuscular, intrathecal, or subcutaneous. In some embodiments, a polypeptide, engineered nucleic acid, vector, or composition of the disclosure is administered intravenously, subcutaneously, intramuscularly intrathecally or intranasally. In some embodiments, a polypeptide, nucleic acid, vector, or composition of the disclosure is administered directly (e.g., by direct injection) to one or more cells (e.g., cardiac or skeletal muscle cells), tissues (e.g., cardiac or skeletal muscle), or organs (e.g., heart). Other routes of administration are contemplated herein. The administration route can be changed depending on a number of factors, including the desired cell, tissue, or organ.

[0185] Formulations comprising pharmaceutically-acceptable excipients and/or carrier solutions are well-known to those of skill in the art, as is the development of suitable dosing and treatment regimens for using the particular compositions described herein in a variety of treatment regimens, including e.g., oral, parenteral, intravenous, intranasal, intraarticular, and intramuscular administration and formulation.

[0186] In one aspect, the present disclosure relates to methods of achieving localized delivery of a gene therapy vector (e.g., an rAAV vector) to a muscle of a subject. Localized delivery to a muscle can be achieved through different methods including, but not limited to, catheter-based methods, local injections, local injection devices, microneedles or drug-eluting stents or drug-eluting implants. In one aspect, the present disclosure relates to catheter-based methods of delivering gene therapy vectors to a muscle. Examples of catheters include, but are not limited to, guiding catheters, microporous infusion catheters, balloon catheters, porous balloon catheters, microporous balloon catheters, retractable-needle catheters, over-the-needle (OTN) catheters, iontophoretic catheters or butterfly catheters. In some embodiments, the muscle is cardiac muscle. In some embodiments, the muscle is skeletal muscle. Non-limiting examples of skeletal muscles include arm muscles, hand muscles, shoulder muscles, chest muscles, neck muscles, muscles of the larynx, scalp muscles, eye muscles, hip muscles, leg muscles and thigh muscles.

[0187] In some embodiments, catheter delivery allows the combined delivery of one or more gene therapy vectors to the cardiac muscle and to one or more skeletal muscle(s). In some embodiments, the gene therapy vector delivered to the cardiac muscle is the same as the gene therapy vector delivered to the skeletal muscle(s). In some embodiments, the gene therapy vector delivered to the cardiac muscle is different from the gene therapy vector delivered to the skeletal muscle(s). In some embodiments, the catheter has multiple lumens for the delivery of the different gene therapy vectors. In some embodiments, the catheter has a single lumen. In some embodiments, the different gene therapy vectors are sequentially introduced as the catheter is moved to different arteries. In some embodiments, the combined delivery to cardiac and skeletal muscles comprises advancing a catheter to heart, delivering a gene therapy vector into the left and right coronary arteries, retracting the catheter to the aortic arch, and delivering a gene therapy vector to arteries that irrigate the skeletal muscles (e.g., the subclavian and/or carotid arteries). In some embodiments, the method further comprises retracting the catheter into the descending aorta and delivering the gene therapy to skeletal muscle via descending aortic branches.

[0188] In some embodiments, the present disclosure relates to the delivery of a gene therapy vector to an artery via a catheter. Non-limiting examples of arteries include a femoral artery, a subclavian artery, a carotid artery, an axillary artery, a brachial artery, a radial artery, an ulnar artery, an iliac artery, a popliteal artery, a tibial artery, a dorsalis pedis artery and an aorta. In some embodiments, the gene therapy vector is delivered to a subclavian and/or a carotid artery. In some embodiments, the catheter is first introduced into the femoral artery and advanced to the subclavian and/or carotid arteries. In some embodiments, the catheter is then retracted into the descending aorta to deliver the gene therapy vector to skeletal muscle via descending aortic branches.

[0189] In some embodiments, the methods described herein relate to the delivery of a first rAAV to cardiac muscle and a second rAAV to a skeletal muscle, comprising: (i) introducing a catheter into the femoral artery and advancing to the heart; (ii) delivering the first gene therapy vector into the left and right coronary arteries; (iii) retracting the catheter to the aortic arch; and (iv) delivering the second gene therapy vector to the subclavian and/or carotid arteries. In some embodiments, the first and second rAAVs have different capsid serotypes. In some embodiments, the first and second rAA Vs have the same capsid serotype. In some embodiments, the first and second rAA Vs carry the same therapeutic gene. In some embodiments, the first and second rAA Vs carry different therapeutic genes. In some embodiments, a first rAAV carries a micro-dystrophin gene optimized for cardiac muscle and the second rAAV carries a micro-dystrophin gene optimized for skeletal muscle.

[0190] In some embodiments, a vasodilator is administered to the subject prior to, or simultaneously with, the introduction of the catheter into an artery for gene therapy vector delivery. Vasodilators are medications that open (dilate) blood vessels. Non-limiting examples of vasodilators are arterial dilators, venous dilators, mixed dilators, nitroprusside, nitroglycerin, nitric oxide, hydralazine, allicin, nitrates, isosorbide dinitrate, isosorbide mononitrate, erythrityl tetranitrate, pentaerythritol tetranitrate, sodium nitroprusside, alpha-adrenoceptor antagonists (alpha blockers), al-adrenoceptor antagonists (e.g., prazosin, terazosin, doxazosin, trimazosin), phentolamine, phenoxybenzamine, sympatholytics, angiotensin converting enzyme (ACE) inhibitors (e.g., benazepril, captopril, enalapril, fosinopril, lisinopril, moexipril, quinapril, ramipril), angiotensin receptor blockers (ARBs) (e.g., candesartan, eprosartan, irbesartan, losartan, olmesartan, telmisartan, azilsartan, valsartan), alpha-2-agonists (e.g., α-methyldopa, clonidine), alpha agonist of the alpha-2 adrenergic receptor (e.g., guanabenz, guanfacine) beta2-adrenoceptor agonists (B2-agonists), beta-adrenoceptor agonist (isoprenaline), beta-1-adrenergic agonist (e.g., dobutamine), calcium-channel blockers (CCBs) (e.g., amlodipine, felodipine, isradipine, nicardipine, nifedipine, nimodipine, nitrendipine, verapamil, diltiazem), centrally acting sympatholytics, direct acting vasodilators, endothelin receptor antagonists (e.g., bosentan, ambrisentan), ganglionic blockers (e.g. trimethaphan camsylate), nitrodilators, phosphodiesterase inhibitors, potassium-channel openers (e.g., minoxidil), renin inhibitors (e.g., aliskiren), PDE3 inhibitors (e.g., milrinone, inamrinone, amrinone, cilostazol), PDE5 inhibitors (e.g., sildenafil, tadalafil), epinephrine, norepinephrine, or dopamine. In some embodiments, the vasodilator is adenosine. In some embodiments, the vasodilator is a PDE5 inhibitor. In some embodiments, the PDE5 inhibitor is sildenafil or tadalafil. In some embodiments, the PDE5 inhibitor is sildenafil. In some embodiments, the vasodilator is administered 0, 1, 2, 3, 4, 5, 6, 7, 8, 9, 10, 11, 12, 13, 14, 15, 16, 17, 18, 19, 20, 25, 30, 35, 40, 45, 50, 55, 60, 90, 120, 150 or 180 minutes prior to the delivery of the gene therapy vector.

[0191] In some embodiments, administration of the vasodilator is through intravascular injection. In some embodiments, administration of the vasodilator is through intramuscular injection. In some embodiments, administration of the vasodilator is through ingestion. In some embodiments, administration of the vasodilator is through topical application. s

[0192] In some embodiments, the methods of the present disclosure further comprise inflating a blood pressure cuff on each limb of the subject at the time of delivery of the gene therapy vector.

[0193] In some embodiments, the nucleic acids of the disclosure are delivered via an AAV vector. In some embodiments, the number of AAV particles administered to a subject may be on the order ranging from about 10⁹ to about 10¹⁶ particles, or any values in between, such as for example, about 10⁹, 10¹⁰, 10¹¹10¹², 10¹³, 10¹⁴, 10¹⁵, or 10¹⁶ particles. In some embodiments, the number of AAV particles administered to a subject may be on the order ranging from about 10⁹ to about 10¹⁶ vector genomes (vgs), or any values in between, such as for example, about 10⁹, 10¹⁰, 10¹¹, 10¹², 10¹³, 10¹⁴, 10¹⁵, or 10¹⁶ vgs. The AAV particles can be administered as a single dose, or divided into two or more administrations as may be required to achieve therapy. In some embodiments, the two or more administrations are within 24 hours of each other.

### EXAMPLES

### Example 1. Micro-Dystrophin Constructs that are Optimized for Either Skeletal Muscle or Cardiac Muscle

[0194] Based on studies in mice with micro-dystrophin constructs that are currently in clinical trials, two discoveries were made. First, it was found that the affinity of the micro-dystrophin for its membrane complex is modulated by the inclusion of the first three spectrin-like repeats (FIG. 1). The inclusion of only R1 leads to relatively weak binding, while the presence of R1+R2 or R1+R2+R3 leads to a much higher apparent affinity for the complex.

[0195] Secondly, it was discovered that overexpression of a micro-dystrophin containing either R1+R2 or R1+R2+R3 leads to outcompeting utrophin at the cardiac membrane, while not affecting utrophin in skeletal muscle. This displacement of utrophin in the heart leads to a much more rapid onset of cardiomyopathy and heart failure than if no dystrophin is present. On the other hand, a R1 only containing micro-dystrophin does not outcompete utrophin for its membrane binding in the heart to the same extent. Accordingly, a micro-dystrophin that will be beneficial to the heart, can be designed based on including only R1 of the first three repeats.

[0196] In the case of skeletal muscle, it was found that the greater the affinity for the complex, the better, since utrophin localization is unaffected. Thus, for skeletal muscle, the ideal constructs contain either R1+R2 or R1+R2+R3. However, in some embodiments, in order to accommodate the full C-terminus, it may be necessary to exclude R2 and only include R1.

[0197] Lastly, the loss of regulation of ion channels, including the TRPC1, 3, 6 channels, leads to residual pathology in skeletal and cardiac muscles that the current micro-dystrophins do not address. Accordingly, in some embodiments, regions in the C-terminus of dystrophin, including the syntrophin binding sites and/or the coiled coil regions that interact with dystrobrevin (FIG. 1), are included in micro-dystrophin.

[0198] The following exemplary micro-dystrophin constructs were designed for AAV delivery in view of the above findings. In some embodiments, the micro-dystrophin constructs designed for skeletal muscle are used with a promoter that expresses only in skeletal muscle and not in the heart. In some embodiments, cardiac-specific expression is achieved with the truncated cTnT promoter. In some embodiments, a smaller cTnT promoter is generated to allow use of the largest cardiac micro-dystrophins described below. FIG. 2 shows the order of Repeats (R) and hinges (H), as well as the cysteine-rich portion of the C-terminus (CR), which is commonly included in micro-dystrophins and referred to as the truncated C-terminus, which is then followed by the rest of the C-terminus (CT).

TABLE 1
Cardiac micro-dystrophins

| | Size (amino |
|---|---|
| Elements included in construct | acid number) |
| Nterm-R1_R17-R19_R24 + H4 + trCterm | 1263 |
| Nterm-R1_R17-R19_H4 to 1^{st} coiled coil and proline | 1286 |
| rich region that follows | |
| Nterm-R1_R17-R19_H4 to end of syntrophin region | 1223 |
| Nterm-R1_R17-R19_R24 to 1^{st} coiled coil and proline | 1407 |
| rich region that follows | |
| Nterm-R1_R17-R19_H4 to end of dystrophin | 1418 |
| Nterm-R1_R17-R19_R24 to end of dystrophin | 1539 |

TABLE 2
Skeletal Muscle micro-dystrophins

| | Size (amino |
|---|---|
| Elements included in construct | acid number) |
| Nterm-R2_R16-R17_R24 + H4 + trCterm | 1277 |
| Nterm-R2_R16-R17_H4 to end of syntrophin region | 1237 |
| Nterm-R2_R16-R17_H4 to 1^{st} coiled coil and proline | 1300 |
| rich region that follows | |
| Nterm-R2_R16-R17_R24 to 1^{st} coiled coil and proline | 1421 |
| rich region that follows | |
| Nterm-R2_R23, R24 to end of dystrophin | 1431 |
| Nterm-R2_R16-R17_H4 to end | 1432 |
| Nterm-R1_R16-R17_R24 to end | 1448 |
| Nterm-R2_R16-R17_R24 to end | 1553 |
| Nterm-R2_R16-R17_R24 to end of Syntrophin region | 1358 |

[0199] In the tables above, “-” is used to show the end points of domains that are continuously linked while “_” is used to indicate a deletion between the domains. For example, Nterm-R1_R17-R19_R24 to trCterm indicates that the micro-dystrophin comprises the N-terminus region up to and including R1 linked to R17 up to and including R19 linked to R24 up to and including the truncated C-terminus of dystrophin (i.e., the region between R1 and R17, the region between R19 and R24, and the region after the truncated C-terminus are deleted).

[0200] The amino acid sequences of modules to build the micro-dystrophin proteins described in this example are provided as SEQ ID NOs: 40-52, and 186-187 below. The amino acids of the micro-dystrophin constructs in Tables 1 and 2 are provided as SEQ ID Nos. 1-6 and 13-21 elsewhere in the description. In some embodiments, the present disclosure provides micro-dystrophin proteins comprising one or more amino acid sequences selected from the group consisting of SEQ ID NOs: 40-52, and 186-187.

N-terminus through Hinge 1 (325 amino acids)
(SEQ ID NO: 40)
MLWWEEVEDCYEREDVQKKTFTKWVNAQFSKFGKQHIENLFSDLQDGRRLLDLLEGLTGQKLPKEKGSTRVHALN
NVNKALRVLQNNNVDLVNIGSTDIVDGNHKLTLGLIWNIILHWQVKNVMKNIMAGLQQTNSEKILLSWVRQSTRN
YPQVNVINFTTSWSDGLALNALIHSHRPDLFDWNSVVCQQSATQRLEHAFNIARYQLGIEKLLDPEDVDTTYPDK
KSILMYITSLFQVLPQQVSIEAIQEVEMLPRPPKVTKEEHFQLHHQMHYSQQITVSLAQGYERTSSPKPRFKSYA
YTQAAYVTTSDPTRSPFPSQHLEAP
Repeat 1 (126 amino acids)
(SEQ ID NO: 41)
EDKSFGSSLMESEVNLDRYQTALEEVLSWLLSAEDTLQAQGEISNDVEVVKDQFHTHEGYMMDLTAHQGRVGNIL
QLGSKLIGTGKLSEDEETEVQEQMNLLNSRWECLRVASMEKQSNLHRVLMD
Repeat 2 (105 amino acids)
(SEQ ID NO: 42)
LQNQKLKELNDWLTKTEERTRKMEEEPLGPDLEDLKRQVQQHKVLQEDLEQEQVRVNSLTHMVVVVDESSGDHAT
AALEEQLKVLGDRWANICRWTEDRWVLLQD
Repeat 3 + 4 residues of H2 (118 amino acids)
(SEQ ID NO: 43)
ILLKWQRLTEEQCLFSAWLSEKEDAVNKIHTTGFKDQNEMLSSLQKLAVLKADLEKKKQSMGKLYSLKQDLLSTL
KNKSVTQKTEAWLDNFARCWDNLVQKLEKSTAQISQAVTTTQP
Repeat 16 + linker (114 + 9 amino acids = 123 amino acids)
(SEQ ID NO: 44)
HTVREETMMVMTEDMPLEISYVPSTYLTEITHVSQALLEVEQLLNAPDLCAKDFEDLFKQEESLKNIKDSLQQSS
GRIDIIHSKKTAALQSATPVERVKLQEALSQLDFQWEKVNKMYKDRQG
Repeat 17 (113amino acids)
(SEQ ID NO: 45)
RFDRSVEKWRRFHYDIKIFNQWLTEAEQFLRKTQIPENWEHAKYKWYLKELQDGIGQRQTVVRTLNATGEEIIQQ
SSKTDASILQEKLGSLNLRWQEVCKQLSDRKKRLEEQK
Repeats 17-19 (327 aa)
(SEQ ID NO: 46)
RFDRSVEKWRRFHYDIKIFNQWLTEAEQFLRKTQIPENWEHAKYKWYLKELQDGIGQRQTVVRTLNATGEEIIQQ
SSKTDASILQEKLGSLNLRWQEVCKQLSDRKKRLEEQKNILSEFQRDLNEFVLWLEEADNIASIPLEPGKEQQLK
EKLEQVKLLVEELPLRQGILKQLNETGGPVLVSAPISPEEQDKLENKLKQTNLQWIKVSRALPEKQGEIEAQIKD
LGQLEKKLEDLEEQLNHLLLWLSPIRNQLEIYNQPNQEGPFDVKETEIAVQAKQPDVEEILSKGQHLYKEKPATQ
PVKRKLEDLSSEWKAVNRLLQELRAKQ
Repeats 17-19 (324 aa)
(SEQ ID NO: 186)
RSVEKWRRFHYDIKIFNQWLTEAEQFLRKTQIPENWEHAKYKWYLKELQDGIGQRQTVVRTLNATGEEII
QQSSKTDASILQEKLGSLNLRWQEVCKQLSDRKKRLEEQKNILSEFQRDLNEFVLWLEEADNIASIPLEP
GKEQQLKEKLEQVKLLVEELPLRQGILKQLNETGGPVLVSAPISPEEQDKLENKLKQTNLQWIKVSRALP
EKQGEIEAQIKDLGQLEKKLEDLEEQLNHLLLWLSPIRNQLEIYNQPNQEGPFDVKETEIAVQAKQPDVE
EILSKGQHLYKEKPATQPVKRKLEDLSSEWKAVNRLLQELRAKQ
Repeat 23 (114 aa)
(SEQ ID NO: 47)
HLSLQELLVWLQLKDDELSRQAPIGGDFPAVQKQNDVHRAFKRELKTKEPVIMSTLETVRIFLTEQPLEGLEKLY
QEPRELPPEERAQNVTRLLRKQAEEVNTEWEKLNLHSAD
Repeat 23 (123 amino acids)
(SEQ ID NO: 187)
ASSDQWKRLHLSLQELLVWLQLKDDELSRQAPIGGDFPAVQKQNDVHRAFKRELKTKEPVIMSTLETVRIFLTEQ
PLEGLEKLYQEPRELPPEERAQNVTRLLRKQAEEVNTEWEKLNLHSAD
Repeat 24 (121 amino acids)
(SEQ ID NO: 48)
WQRKIDETLERLQELQEATDELDLKLRQAEVIKGSWQPVGDLLIDSLQDHLEKVKALRGEIAPLKENVSHVNDLA
RQLTTLGIQLSPYNLSTLEDLNTRWKLLQVAVEDRVRQLHEAHRDF
Hinge 4 + truncated C terminus (364 amino acids)
(SEQ ID NO: 49)
GPASQHELSTSVQGPWERAISPNKVPYYINHETQTTCWDHPKMTELYQSLADLNNVRESAYRTAMKLRRLQKALC
LDLLSLSAACDALDQHNLKQNDQPMDILQIINCLTTIYDRLEQEHNNLVNVPLCVDMCLNWLLNVYDTGRTGRIR
VLSFKTGIISLCKAHLEDKYRYLFKQVASSTGFCDQRRLGLLLHDSIQIPRQLGEVASFGGSNIEPSVRSCFQFA
NNKPEIEAALFLDWMRLEPQSMVWLPVLHRVAAAETAKHQAKCNICKECPIIGFRYRSLKHFNYDICQSCFFSGR
VAKGHKMHYPMVEYCTPTTSGEDVRDFAKVLKNKFRTKRYFAKHPRMGYLPVQTVLEGDNMETP
Syntrophin binding sites (81 amino acids)
(SEQ ID NO: 50)
VTLINFWPVDSAPASSPQLSHDDTHSRIEHYASRLAEMENSNGSYLNDSISPNESIDDEHLLIQHYCQSLNQDSP
LSQPRS
Coiled coil region (195 amino acids)
1st coiled coil adds 47aa; including proline rich region adds 16 more aa
(total of 63aa)
(SEQ ID NO: 51)
PAQILISLESEERGELERILADLEEENRNLQAEYDRLKQQHEHKGLSPLPSPPEMMPTSPQSP
2nd coiled coil region to end of dystrophin; including 2nd coiled coil
adds another 61aa and region after adds 71 more aa (total of 132aa)
(SEQ ID NO: 52)
RDAELIAEAKLLRQHKGRLEARMQILEDHNKQLESQLHRLRQLLEQPQAEAKVNGTTVSSPSTSLQRSDSSQPML
LRVVGSQTSDSMGEEDLLSPPQDTSTGLEEVMEQLNNSFPSSRGRNTPGKPMREDTM

[0201] The nucleotide sequences of modules to build the micro-dystrophin genes described in this example are provided below as SEQ ID NOs: 53-75, and 188-190. The nucleotide sequences of the micro-dystrophin constructs in Tables 1 and 2 are provided as SEQ ID Nos. 7-12 and 22-39 elsewhere in the description. In some embodiments, the present disclosure provides nucleic acid constructs comprising one or more of SEQ ID NOs: 53-75, and 188-190.

N-terminus through Hinge 1
Human sequence without codon alterations:
(SEQ ID NO: 53)
ATGCTTTGGTGGGAAGAAGTAGAGGACTGTTATGAAAGAGAAGATGTTCAAAAGAAAACATTCACAAAATGGGTA
AATGCACAATTTTCTAAGTTTGGGAAGCAGCATATTGAGAACCTCTTCAGTGACCTACAGGATGGGAGGCGCCTC
CTAGACCTCCTCGAAGGCCTGACAGGGCAAAAACTGCCAAAAGAAAAAGGATCCACAAGAGTTCATGCCCTGAAC
AATGTCAACAAGGCACTGCGGGTTTTGCAGAACAATAATGTTGATTTAGTGAATATTGGAAGTACTGACATCGTA
GATGGAAATCATAAACTGACTCTTGGTTTGATTTGGAATATAATCCTCCACTGGCAGGTCAAAAATGTAATGAAA
AATATCATGGCTGGATTGCAACAAACCAACAGTGAAAAGATTCTCCTGAGCTGGGTCCGACAATCAACTCGTAAT
TATCCACAGGTTAATGTAATCAACTTCACCACCAGCTGGTCTGATGGCCTGGCTTTGAATGCTCTCATCCATAGT
CATAGGCCAGACCTATTTGACTGGAATAGTGTGGTTTGCCAGCAGTCAGCCACACAACGACTGGAACATGCATTC
AACATCGCCAGATATCAATTAGGCATAGAGAAACTACTCGATCCTGAAGATGTTGATACCACCTATCCAGATAAG
AAGTCCATCTTAATGTACATCACATCACTCTTCCAAGTTTTGCCTCAACAAGTGAGCATTGAAGCCATCCAGGAA
GTGGAAATGTTGCCAAGGCCACCTAAAGTGACTAAAGAAGAACATTTTCAGTTACATCATCAAATGCACTATTCT
CAACAGATCACGGTCAGTCTAGCACAGGGATATGAGAGAACTTCTTCCCCTAAGCCTCGATTCAAGAGCTATGCC
TACACACAGGCTGCTTATGTCACCACCTCTGACCCTACACGGAGCCCATTTCCTTCACAGCATTTGGAAGCTCCT
Human sequence with codon optimization:
(SEQ ID NO: 54)
ATGCTGTGGTGGGAGGAGGTGGAGGACTGCTACGAGCGGGAGGACGTGCAGAAGAAGACCTTCACCAAGTGGGTG
AACGCCCAGTTCAGCAAGTTCGGCAAGCAGCACATCGAGAACCTGTTCAGCGACCTGCAGGACGGCCGGCGGCTG
CTGGACCTGCTGGAGGGCCTGACCGGCCAGAAGCTGCCCAAGGAGAAGGGCAGCACCCGGGTGCACGCCCTGAAC
AACGTGAACAAGGCCCTGCGGGTGCTGCAGAACAACAACGTGGACCTGGTGAACATCGGCAGCACCGACATCGTG
GACGGCAACCACAAGCTGACCCTGGGCCTGATCTGGAACATCATCCTGCACTGGCAGGTGAAGAACGTGATGAAG
AACATCATGGCCGGCCTGCAGCAGACCAACAGCGAGAAGATCCTGCTGAGCTGGGTGCGGCAGAGCACCCGGAAC
TACCCCCAGGTGAACGTGATCAACTTCACCACCAGCTGGAGCGACGGCCTGGCCCTGAACGCCCTGATCCACAGC
CACCGGCCCGACCTGTTCGACTGGAACAGCGTGGTGTGCCAGCAGAGCGCCACCCAGCGGCTGGAGCACGCCTTC
AACATCGCCCGGTACCAGCTGGGCATCGAGAAGCTGCTGGACCCCGAGGACGTGGACACCACCTACCCCGACAAG
AAGAGCATCCTGATGTACATCACCAGCCTGTTCCAGGTGCTGCCCCAGCAGGTGAGCATCGAGGCCATCCAGGAG
GTGGAGATGCTGCCCCGGCCCCCCAAGGTGACCAAGGAGGAGCACTTCCAGCTGCACCACCAGATGCACTACAGC
CAGCAGATCACCGTGAGCCTGGCCCAGGGCTACGAGCGGACCAGCAGCCCCAAGCCCCGGTTCAAGAGCTACGCC
TACACCCAGGCCGCCTACGTGACCACCAGCGACCCCACCCGGAGCCCCTTCCCCAGCCAGCACCTGGAGGCCCCC
Repeat 1
Human sequence without codon alterations:
(SEQ ID NO: 55)
GAAGACAAGTCATTTGGCAGTTCATTGATGGAGAGTGAAGTAAACCTGGACCGTTATCAAACAGCTTTAGAAGAA
GTATTATCGTGGCTTCTTTCTGCTGAGGACACATTGCAAGCACAAGGAGAGATTTCTAATGATGTGGAAGTGGTG
AAAGACCAGTTTCATACTCATGAGGGGTACATGATGGATTTGACAGCCCATCAGGGCCGGGTTGGTAATATTCTA
CAATTGGGAAGTAAGCTGATTGGAACAGGAAAATTATCAGAAGATGAAGAAACTGAAGTACAAGAGCAGATGAAT
CTCCTAAATTCAAGATGGGAATGCCTCAGGGTAGCTAGCATGGAAAAACAAAGCAATTTACATAGAGTTTTAATG
GAT
Human sequence with codon optimization:
(SEQ ID NO: 56)
GAGGACAAGAGCTTCGGCAGCAGCCTGATGGAGAGCGAGGTGAACCTGGACCGGTACCAGACCGCCCTGGAGGAG
GTGCTGAGCTGGCTGCTGAGCGCCGAGGACACCCTGCAGGCCCAGGGCGAGATCAGCAACGACGTGGAGGTGGTG
AAGGACCAGTTCCACACCCACGAGGGCTACATGATGGACCTGACCGCCCACCAGGGCCGGGTGGGCAACATCCTG
CAGCTGGGCAGCAAGCTGATCGGCACCGGCAAGCTGAGCGAGGACGAGGAGACCGAGGTGCAGGAGCAGATGAAC
CTGCTGAACAGCCGGTGGGAGTGCCTGCGGGTGGCCAGCATGGAGAAGCAGAGCAACCTGCACCGGGTGCTGATG
GAC
Repeat 2
Human sequence without codon alterations:
(SEQ ID NO: 57)
CTCCAGAATCAGAAACTGAAAGAGTTGAATGACTGGCTAACAAAAACAGAAGAAAGAACAAGGAAAATGGAGGAA
GAGCCTCTTGGACCTGATCTTGAAGACCTAAAACGCCAAGTACAACAACATAAGGTGCTTCAAGAAGATCTAGAA
CAAGAACAAGTCAGGGTCAATTCTCTCACTCACATGGTGGTGGTAGTTGATGAATCTAGTGGAGATCACGCAACT
GCTGCTTTGGAAGAACAACTTAAGGTATTGGGAGATCGATGGGCAAACATCTGTAGATGGACAGAAGACCGCTGG
GTTCTTTTACAAGAC
Human sequence with codon optimization:
(SEQ ID NO: 58)
CTGCAGAACCAGAAGCTGAAGGAGCTGAACGACTGGCTGACCAAGACCGAGGAGCGGACCCGGAAGATGGAGGAG
GAGCCCCTGGGCCCCGACCTGGAGGACCTGAAGCGGCAGGTGCAGCAGCACAAGGTGCTGCAGGAGGACCTGGAG
CAGGAGCAGGTGCGGGTGAACAGCCTGACCCACATGGTGGTGGTGGTGGACGAGAGCAGCGGCGACCACGCCACC
GCCGCCCTGGAGGAGCAGCTGAAGGTGCTGGGCGACCGGTGGGCCAACATCTGCCGGTGGACCGAGGACCGGTGG
GTGCTGCTGCAGGAC
Repeat 16 + linker
Human sequence without codon alterations:
(SEQ ID NO: 59)
CACACTGTCCGTGAAGAAACGATGATGGTGATGACTGAAGACATGCCTTTGGAAATTTCTTATGTGCCTTCTACT
TATTTGACTGAAATCACTCATGTCTCACAAGCCCTATTAGAAGTGGAACAACTTCTCAATGCTCCTGACCTCTGT
GCTAAGGACTTTGAAGATCTCTTTAAGCAAGAGGAGTCTCTGAAGAATATAAAAGATAGTCTACAACAAAGCTCA
GGTCGGATTGACATTATTCATAGCAAGAAGACAGCAGCATTGCAAAGTGCAACGCCTGTGGAAAGGGTGAAGCTA
CAGGAAGCTCTCTCCCAGCTTGATTTCCAATGGGAAAAAGTTAACAAAATGTACAAGGACCGACAAGGG
Human sequence with codon optimization:
(SEQ ID NO: 60)
CACACCGTGCGGGAGGAGACCATGATGGTGATGACCGAGGACATGCCCCTGGAGATCAGCTACGTGCCCAGCACC
TACCTGACCGAGATCACCCACGTGAGCCAGGCCCTGCTGGAGGTGGAGCAGCTGCTGAACGCCCCCGACCTGTGC
GCCAAGGACTTCGAGGACCTGTTCAAGCAGGAGGAGAGCCTGAAGAACATCAAGGACAGCCTGCAGCAGAGCAGC
GGCCGGATCGACATCATCCACAGCAAGAAGACCGCCGCCCTGCAGAGCGCCACCCCCGTGGAGCGGGTGAAGCTG
CAGGAGGCCCTGAGCCAGCTGGACTTCCAGTGGGAGAAGGTGAACAAGATGTACAAGGACCGGCAGGGC
Repeat 17
Human sequence without codon alterations:
(SEQ ID NO: 61)
CGATTTGACAGATCTGTTGAGAAATGGCGGCGTTTTCATTATGATATAAAGATATTTAATCAGTGGCTAACAGAA
GCTGAACAGTTTCTCAGAAAGACACAAATTCCTGAGAATTGGGAACATGCTAAATACAAATGGTATCTTAAGGAA
CTCCAGGATGGCATTGGGCAGCGGCAAACTGTTGTCAGAACATTGAATGCAACTGGGGAAGAAATAATTCAGCAA
TCCTCAAAAACAGATGCCAGTATTCTACAGGAAAAATTGGGAAGCCTGAATCTGCGGTGGCAGGAGGTCTGCAAA
CAGCTGTCAGACAGAAAAAAGAGGCTAGAAGAACAAAAG
Human sequence with codon optimization:
(SEQ ID NO: 62)
CGGTTCGACCGGAGCGTGGAGAAGTGGCGGCGGTTCCACTACGACATCAAGATCTTCAACCAGTGGCTGACCGAG
GCCGAGCAGTTCCTGCGGAAGACCCAGATCCCCGAGAACTGGGAGCACGCCAAGTACAAGTGGTACCTGAAGGAG
CTGCAGGACGGCATCGGCCAGCGGCAGACCGTGGTGCGGACCCTGAACGCCACCGGCGAGGAGATCATCCAGCAG
AGCAGCAAGACCGACGCCAGCATCCTGCAGGAGAAGCTGGGCAGCCTGAACCTGCGGTGGCAGGAGGTGTGCAAG
CAGCTGAGCGACCGGAAGAAGCGGCTGGAGGAGCAGAAG
Repeats 17-19 (encoding 327 aa)
Human sequence without codon alterations:
(SEQ ID NO: 63)
CGATTTGACAGATCTGTTGAGAAATGGCGGCGTTTTCATTATGATATAAAGATATTTAATCAGTGGCTAACAGAA
GCTGAACAGTTTCTCAGAAAGACACAAATTCCTGAGAATTGGGAACATGCTAAATACAAATGGTATCTTAAGGAA
CTCCAGGATGGCATTGGGCAGCGGCAAACTGTTGTCAGAACATTGAATGCAACTGGGGAAGAAATAATTCAGCAA
TCCTCAAAAACAGATGCCAGTATTCTACAGGAAAAATTGGGAAGCCTGAATCTGCGGTGGCAGGAGGTCTGCAAA
CAGCTGTCAGACAGAAAAAAGAGGCTAGAAGAACAAAAGAATATCTTGTCAGAATTTCAAAGAGATTTAAATGAA
TTTGTTTTATGGTTGGAGGAAGCAGATAACATTGCTAGTATCCCACTTGAACCTGGAAAAGAGCAGCAACTAAAA
GAAAAGCTTGAGCAAGTCAAGTTACTGGTGGAAGAGTTGCCCCTGCGCCAGGGAATTCTCAAACAATTAAATGAA
ACTGGAGGACCCGTGCTTGTAAGTGCTCCCATAAGCCCAGAAGAGCAAGATAAACTTGAAAATAAGCTCAAGCAG
ACAAATCTCCAGTGGATAAAGGTTTCCAGAGCTTTACCTGAGAAACAAGGAGAAATTGAAGCTCAAATAAAAGAC
CTTGGGCAGCTTGAAAAAAAGCTTGAAGACCTTGAAGAGCAGTTAAATCATCTGCTGCTGTGGTTATCTCCTATT
AGGAATCAGTTGGAAATTTATAACCAACCAAACCAAGAAGGACCATTTGACGTTAAGGAAACTGAAATAGCAGTT
CAAGCTAAACAACCGGATGTGGAAGAGATTTTGTCTAAAGGGCAGCATTTGTACAAGGAAAAACCAGCCACTCAG
CCAGTGAAGAGGAAGTTAGAAGATCTGAGCTCTGAGTGGAAGGCGGTAAACCGTTTACTTCAAGAGCTGAGGGCA
AAGCAG
Repeats 17-19 (encoding 324 aa)
Human sequence without codon alterations:
(SEQ ID NO: 188)
AGATCTGTTGAGAAATGGCGGCGTTTTCATTATGATATAAAGATATTTAATCAGTGGCTAACAGAAGCTGAACAG
TTTCTCAGAAAGACACAAATTCCTGAGAATTGGGAACATGCTAAATACAAATGGTATCTTAAGGAACTCCAGGAT
GGCATTGGGCAGCGGCAAACTGTTGTCAGAACATTGAATGCAACTGGGGAAGAAATAATTCAGCAATCCTCAAAA
ACAGATGCCAGTATTCTACAGGAAAAATTGGGAAGCCTGAATCTGCGGTGGCAGGAGGTCTGCAAACAGCTGTCA
GACAGAAAAAAGAGGCTAGAAGAACAAAAGAATATCTTGTCAGAATTTCAAAGAGATTTAAATGAATTTGTTTTA
TGGTTGGAGGAAGCAGATAACATTGCTAGTATCCCACTTGAACCTGGAAAAGAGCAGCAACTAAAAGAAAAGCTT
GAGCAAGTCAAGTTACTGGTGGAAGAGTTGCCCCTGCGCCAGGGAATTCTCAAACAATTAAATGAAACTGGAGGA
CCCGTGCTTGTAAGTGCTCCCATAAGCCCAGAAGAGCAAGATAAACTTGAAAATAAGCTCAAGCAGACAAATCTC
CAGTGGATAAAGGTTTCCAGAGCTTTACCTGAGAAACAAGGAGAAATTGAAGCTCAAATAAAAGACCTTGGGCAG
CTTGAAAAAAAGCTTGAAGACCTTGAAGAGCAGTTAAATCATCTGCTGCTGTGGTTATCTCCTATTAGGAATCAG
TTGGAAATTTATAACCAACCAAACCAAGAAGGACCATTTGACGTTAAGGAAACTGAAATAGCAGTTCAAGCTAAA
CAACCGGATGTGGAAGAGATTTTGTCTAAAGGGCAGCATTTGTACAAGGAAAAACCAGCCACTCAGCCAGTGAAG
AGGAAGTTAGAAGATCTGAGCTCTGAGTGGAAGGCGGTAAACCGTTTACTTCAAGAGCTGAGGGCAAAGCAG
Repeat 23 (encoding 114 aa)
Human sequence without codon alterations:
(SEQ ID NO: 64)
CACCTTTCTCTGCAGGAACTTCTGGTGTGGCTACAGCTGAAAGATGATGAATTAAGCCGGCAGGCACCTATTGGA
GGCGACTTTCCAGCAGTTCAGAAGCAGAACGATGTACATAGGGCCTTCAAGAGGGAATTGAAAACTAAAGAACCT
GTAATCATGAGTACTCTTGAGACTGTACGAATATTTCTGACAGAGCAGCCTTTGGAAGGACTAGAGAAACTCTAC
CAGGAGCCCAGAGAGCTGCCTCCTGAGGAGAGAGCCCAGAATGTCACTCGGCTICTACGAAAGCAGGCTGAGGAG
GTCAATACTGAGTGGGAAAAATTGAACCTGCACTCCGCTGAC
Human Sequences with codon optimization:
(SEQ ID NO: 65)
CACCTGAGCCTGCAGGAGCTGCTGGTGTGGCTGCAGCTGAAGGACGACGAGCTGAGCCGGCAGGCCCCCATCGGC
GGCGACTTCCCCGCCGTGCAGAAGCAGAACGACGTGCACCGGGCCTTCAAGCGGGAGCTGAAGACCAAGGAGCCC
GTGATCATGAGCACCCTGGAGACCGTGCGGATCTTCCTGACCGAGCAGCCCCTGGAGGGCCTGGAGAAGCTGTAC
CAGGAGCCCCGGGAGCTGCCCCCCGAGGAGCGGGCCCAGAACGTGACCCGGCTGCTGCGGAAGCAGGCCGAGGAG
GTGAACACCGAGTGGGAGAAGCTGAACCTGCACAGCGCCGAC
Repeat 23 (encoding 123 aa)
Human sequence without codon alterations:
(SEQ ID NO: 189)
GCCAGTTCTGACCAGTGGAAGCGTCTGCACCTTTCTCTGCAGGAACTTCTGGTGTGGCTACAGCTGAAAGATGAT
GAATTAAGCCGGCAGGCACCTATTGGAGGCGACTTTCCAGCAGTTCAGAAGCAGAACGATGTACATAGGGCCTTC
AAGAGGGAATTGAAAACTAAAGAACCTGTAATCATGAGTACTCTTGAGACTGTACGAATATTTCTGACAGAGCAG
CCTTTGGAAGGACTAGAGAAACTCTACCAGGAGCCCAGAGAGCTGCCTCCTGAGGAGAGAGCCCAGAATGTCACT
CGGCTTCTACGAAAGCAGGCTGAGGAGGTCAATACTGAGTGGGAAAAATTGAACCTGCACTCCGCTGAC
Human sequence with codon optimization:
(SEQ ID NO: 190)
GCCAGCAGCGACCAGTGGAAGCGGCTGCACCTGAGCCTGCAGGAGCTGCTGGTGTGGCTGCAGCTGAAGGACGAC
GAGCTGAGCCGGCAGGCCCCCATCGGCGGCGACTTCCCCGCCGTGCAGAAGCAGAACGACGTGCACCGGGCCTTC
AAGCGGGAGCTGAAGACCAAGGAGCCCGTGATCATGAGCACCCTGGAGACCGTGCGGATCTTCCTGACCGAGCAG
CCCCTGGAGGGCCTGGAGAAGCTGTACCAGGAGCCCCGGGAGCTGCCCCCCGAGGAGCGGGCCCAGAACGTGACC
CGGCTGCTGCGGAAGCAGGCCGAGGAGGTGAACACCGAGTGGGAGAAGCTGAACCTGCACAGCGCCGAC
Repeat 24
Human Sequences without codon alterations:
(SEQ ID NO: 66)
TGGCAGAGAAAAATAGATGAGACCCTTGAAAGACTCCGGGAACTTCAAGAGGCCACGGATGAGCTGGACCTCAAG
CTGCGCCAAGCTGAGGTGATCAAGGGATCCTGGCAGCCCGTGGGCGATCTCCTCATTGACTCTCTCCAAGATCAC
CTCGAGAAAGTCAAGGCACTTCGAGGAGAAATTGCGCCTCTGAAAGAGAACGTGAGCCACGTCAATGACCTTGCT
CGCCAGCTTACCACTTTGGGCATTCAGCTCTCACCGTATAACCTCAGCACTCTGGAAGACCTGAACACCAGATGG
AAGCTTCTGCAGGTGGCCGTCGAGGACCGAGTCAGGCAGCTGCATGAAGCCCACAGGGACTTT
Human Sequences with codon optimization:
(SEQ ID NO: 67)
TGGCAGCGGAAGATCGACGAGACCCTGGAGCGGCTGCAGGAGCTGCAGGAGGCCACCGACGAGCTGGACCTGAAG
CTGCGGCAGGCCGAGGTGATCAAGGGCAGCTGGCAGCCCGTGGGCGACCTGCTGATCGACAGCCTGCAGGACCAC
CTGGAGAAGGTGAAGGCCCTGCGGGGCGAGATCGCCCCCCTGAAGGAGAACGTGAGCCACGTGAACGACCTGGCC
CGGCAGCTGACCACCCTGGGCATCCAGCTGAGCCCCTACAACCTGAGCACCCTGGAGGACCTGAACACCCGGTGG
AAGCTGCTGCAGGTGGCCGTGGAGGACCGGGTGCGGCAGCTGCACGAGGCCCACCGGGACTTC
Hinge 4 + truncated C terminus
Human Sequences without codon alterations:
(SEQ ID NO: 68)
GGTCCAGCATCTCAGCACTTTCTTTCCACGTCTGTCCAGGGTCCCTGGGAGAGAGCCATCTCGCCAAACAAAGTG
CCCTACTATATCAACCACGAGACTCAAACAACTTGCTGGGACCATCCCAAAATGACAGAGCTCTACCAGTCTTTA
GCTGACCTGAATAATGTCAGATTCTCAGCTTATAGGACTGCCATGAAACTCCGAAGACTGCAGAAGGCCCTTTGC
TTGGATCTCTTGAGCCTGTCAGCTGCATGTGATGCCTTGGACCAGCACAACCTCAAGCAAAATGACCAGCCCATG
GATATCCTGCAGATTATTAATTGTTTGACCACTATTTATGACCGCCTGGAGCAAGAGCACAACAATTTGGTCAAC
GTCCCTCTCTGCGTGGATATGTGTCTGAACTGGCTGCTGAATGTTTATGATACGGGACGAACAGGGAGGATCCGT
GTCCTGTCTTTTAAAACTGGCATCATTTCCCTGTGTAAAGCACATTTGGAAGACAAGTACAGATACCTTTTCAAG
CAAGTGGCAAGTTCAACAGGATTTTGTGACCAGCGCAGGCTGGGCCTCCTTCTGCATGATTCTATCCAAATTCCA
AGACAGTTGGGTGAAGTTGCATCCTTTGGGGGCAGTAACATTGAGCCAAGTGTCCGGAGCTGCTTCCAATTTGCT
AATAATAAGCCAGAGATCGAAGCGGCCCTCTTCCTAGACTGGATGAGACTGGAACCCCAGTCCATGGTGTGGCTG
CCCGTCCTGCACAGAGTGGCTGCTGCAGAAACTGCCAAGCATCAGGCCAAATGTAACATCTGCAAAGAGTGTCCA
ATCATTGGATTCAGGTACAGGAGTCTAAAGCACTTTAATTATGACATCTGCCAAAGCTGCTTTTTTTCTGGTCGA
GTTGCAAAAGGCCATAAAATGCACTATCCCATGGTGGAATATTGCACTCCGACTACATCAGGAGAAGATGTTCGA
GACTTTGCCAAGGTACTAAAAAACAAATTTCGAACCAAAAGGTATTTTGCGAAGCATCCCCGAATGGGCTACCTG
CCAGTGCAGACTGTCTTAGAGGGGGACAACATGGAAACTCCC
Human Sequences with codon optimization:
(SEQ ID NO: 69)
GGCCCCGCCAGCCAGCACTTCCTGAGCACCAGCGTGCAGGGCCCCTGGGAGCGGGCCATCAGCCCCAACAAGGTG
CCCTACTACATCAACCACGAGACCCAGACCACCTGCTGGGACCACCCCAAGATGACCGAGCTGTACCAGAGCCTG
GCCGACCTGAACAACGTGCGGTTCAGCGCCTACCGGACCGCCATGAAGCTGCGGCGGCTGCAGAAGGCCCTGTGC
CTGGACCTGCTGAGCCTGAGCGCCGCCTGCGACGCCCTGGACCAGCACAACCTGAAGCAGAACGACCAGCCCATG
GACATCCTGCAGATCATCAACTGCCTGACCACCATCTACGACCGGCTGGAGCAGGAGCACAACAACCTGGTGAAC
GTGCCCCTGTGCGTGGACATGTGCCTGAACTGGCTGCTGAACGTGTACGACACCGGCCGGACCGGCCGGATCCGG
GTGCTGAGCTTCAAGACCGGCATCATCAGCCTGTGCAAGGCCCACCTGGAGGACAAGTACCGGTACCTGTTCAAG
CAGGTGGCCAGCAGCACCGGCTTCTGCGACCAGCGGCGGCTGGGCCTGCTGCTGCACGACAGCATCCAGATCCCC
CGGCAGCTGGGCGAGGTGGCCAGCTTCGGCGGCAGCAACATCGAGCCCAGCGTGCGGAGCTGCTTCCAGTTCGCC
AACAACAAGCCCGAGATCGAGGCCGCCCTGTTCCTGGACTGGATGCGGCTGGAGCCCCAGAGCATGGTGTGGCTG
CCCGTGCTGCACCGGGTGGCCGCCGCCGAGACCGCCAAGCACCAGGCCAAGTGCAACATCTGCAAGGAGTGCCCC
ATCATCGGCTTCCGGTACCGGAGCCTGAAGCACTTCAACTACGACATCTGCCAGAGCTGCTTCTTCAGCGGCCGG
GTGGCCAAGGGCCACAAGATGCACTACCCCATGGTGGAGTACTGCACCCCCACCACCAGCGGCGAGGACGTGCGG
GACTTCGCCAAGGTGCTGAAGAACAAGTTCCGGACCAAGCGGTACTTCGCCAAGCACCCCCGGATGGGCTACCTG
CCCGTGCAGACCGTGCTGGAGGGCGACAACATGGAGACCCCC
Syntrophin binding sites
Human Sequences without codon alterations:
(SEQ ID NO: 70)
GTTACTCTGATCAACTTCTGGCCAGTAGATTCTGCGCCTGCCTCGTCCCCTCAGCTTTCACACGATGATACTCAT
TCACGCATTGAACATTATGCTAGCAGGCTAGCAGAAATGGAAAACAGCAATGGATCTTATCTAAATGATAGCATC
TCTCCTAATGAGAGCATAGATGATGAACATTTGTTAATCCAGCATTACTGCCAAAGTTTGAACCAGGACTCCCCC
CTGAGCCAGCCTCGTAGT
Human Sequences with codon optimization:
(SEQ ID NO: 71)
GTGACCCTGATCAACTTCTGGCCCGTGGACAGCGCCCCCGCCAGCAGCCCCCAGCTGAGCCACGACGACACCCAC
AGCCGGATCGAGCACTACGCCAGCCGGCTGGCCGAGATGGAGAACAGCAACGGCAGCTACCTGAACGACAGCATC
AGCCCCAACGAGAGCATCGACGACGAGCACCTGCTGATCCAGCACTACTGCCAGAGCCTGAACCAGGACAGCCCC
CTGAGCCAGCCCCGGAGC
Coiled coil region
1st coiled coil plus proline rich region
Human sequence without codon alterations:
(SEQ ID NO: 72)
CCTGCCCAGATCTTGATTTCCTTAGAGAGTGAGGAAAGAGGGGAGCTAGAGAGAATCCTAGCAGATCTTGAGGAA
GAAAACAGGAATCTGCAAGCAGAATATGACCGTCTAAAGCAGCAGCACGAACATAAAGGCCTGTCCCCACTGCCG
TCCCCTCCTGAAATGATGCCCACCTCTCCCCAGAGTCCC
Human sequence with codon optimization:
(SEQ ID NO: 73)
CCCGCCCAGATCCTGATCAGCCTGGAGAGCGAGGAGCGGGGCGAGCTGGAGCGGATCCTGGCCGACCTGGAGGAG
GAGAACCGGAACCTGCAGGCCGAGTACGACCGGCTGAAGCAGCAGCACGAGCACAAGGGCCTGAGCCCCCTGCCC
AGCCCCCCCGAGATGATGCCCACCAGCCCCCAGAGCCCC
2nd coiled coil region to end of dystrophin
Human sequence without codon alterations:
(SEQ ID NO: 74)
CGGGATGCTGAGCTCATTGCTGAGGCCAAGCTACTGCGTCAACACAAAGGCCGCCTGGAAGCCAGGATGCAAATC
CTGGAAGACCACAATAAACAGCTGGAGTCACAGTTACACAGGCTAAGGCAGCTGCTGGAGCAACCCCAGGCAGAG
GCCAAAGTGAATGGCACAACGGTGTCCTCTCCTTCTACCTCTCTACAGAGGTCCGACAGCAGTCAGCCTATGCTG
CTCCGAGTGGTTGGCAGTCAAACTTCGGACTCCATGGGTGAGGAAGATCTTCTCAGTCCTCCCCAGGACACAAGC
ACAGGGTTAGAGGAGGTGATGGAGCAACTCAACAACTCCTTCCCTAGTTCAAGAGGAAGAAATACCCCTGGAAAG
CCAATGAGAGAGGACACAATG
Human sequence with codon optimization:
(SEQ ID NO: 75)
CGGGACGCCGAGCTGATCGCCGAGGCCAAGCTGCTGCGGCAGCACAAGGGCCGGCTGGAGGCCCGGATGCAGATC
CTGGAGGACCACAACAAGCAGCTGGAGAGCCAGCTGCACCGGCTGCGGCAGCTGCTGGAGCAGCCCCAGGCCGAG
GCCAAGGTGAACGGCACCACCGTGAGCAGCCCCAGCACCAGCCTGCAGCGGAGCGACAGCAGCCAGCCCATGCTG
CTGCGGGTGGTGGGCAGCCAGACCAGCGACAGCATGGGCGAGGAGGACCTGCTGAGCCCCCCCCAGGACACCAGC
ACCGGCCTGGAGGAGGTGATGGAGCAGCTGAACAACAGCTTCCCCAGCAGCCGGGGCCGGAACACCCCCGGCAAG
CCCATGCGGGAGGACACCATG

### Example 2. New Skeletal Muscle-Specific Promoter

[0202] The finding that the heart and skeletal muscle may need different micro-dystrophin constructs delivered to each muscle type, motivated the need for a small, skeletal muscle-specific promoter. Elements from the skeletal muscle alpha-actin promoter were taken to construct such a promoter. It consists of one or two copies of the 99 bp skeletal muscle alpha-actin enhancer and 274 bases of the core promoter elements, resulting in a 380 bp construct (or 479 bp with 2 enhancers).

[0203] Sequences of the promoter are provided below. In some embodiments, the promoter comprises any one of SEQ ID NOs: 76-80. In some embodiments, the promoter comprises one or more of SEQ ID NOs: 76-80.

380 bp construct
Enhancer
(Xbal site for cutting 5' end)
(SEQ ID NO: 76)
TCTAGAAAATCTGAAAGGCATAGCCCCATATATCAGTGATATAAATAGAA
CCTGCAGCAGGCTCTGGTAAATGATGACTACAAGGTGGACTGGGAGGCAG
CCCGGC
Core Promoter + KOZAK
(SEQ ID NO: 77)
AGGAGGGGCAAACCCGCTAGGGAGACACTCCATATACGGCCCGGCCCGCG
TTACCTGGGACCGGGCCAACCCGCTCCTTCTTTGGTCAACGCAGGGGACC
CGGGCGGGGGCCCAGGCCGCGAACCGGCCGAGGGAGGGGGCTCTAGTGCC
CAACACCCAAATATGGCTCGAGAAGGGCAGCGACATTCCTGCGGGGTGGC
GCGGAGGGAATGCCCGCGGGCTATATAAAACCTGAGCAGAGGGACAAGCG
GCCACCGCAGCGGACAGCGCCACC ATGG

[0204] ATG+G-initiation codon+G of coding sequence follows and completes the optimal KOZAK and creates a NcoI site (CCATGG) to cut the full promoter. The G after the ATG is not necessary if other cloning strategies are preferred.

The promoter sequence itself is 380 bp:
(SEQ ID NO: 78)
TCTAGAAAATCTGAAAGGCATAGCCCCATATATCAGTGATATAAATAGAA
CCTGCAGCAGGCTCTGGTAAATGATGACTACAAGGTGGACTGGGAGGCAG
CCCGGCAGGAGGGGCAAACCCGCTAGGGAGACACTCCATATACGGCCCGG
CCCGCGTTACCTGGGACCGGGCCAACCCGCTCCTTCTTTGGTCAACGCAG
GGGACCCGGGCGGGGGCCCAGGCCGCGAACCGGCCGAGGGAGGGGGCTCT
AGTGCCCAACACCCAAATATGGCTCGAGAAGGGCAGCGACATTCCTGCGG
GGTGGCGCGGAGGGAATGCCCGCGGGCTATATAAAACCTGAGCAGAGGGA
CAAGCGGCCACCGCAGCGGACAGCGCCACC
479 bp construct (stronger promoter)
Back to back Enhancers
(Xbal site for cutting 5' end)
(SEQ ID NO: 79)
TCTAGAAAATCTGAAAGGCATAGCCCCATATATCAGTGATATAAATAGAA
CCTGCAGCAGGCTCTGGTAAATGATGACTACAAGGTGGACTGGGAGGCAG
CCCGGCAATCTGAAAGGCATAGCCCCATATATCAGTGATATAAATAGAAC
CTGCAGCAGGCTCTGGTAAATGATGACTACAAGGTGGACTGGGAGGCAGC
CCGGC
Core Promoter + KOZAK
(SEQ ID NO: 77)
AGGAGGGGCAAACCCGCTAGGGAGACACTCCATATACGGCCCGGCCCGCG
TTACCTGGGACCGGGCCAACCCGCTCCTTCTTTGGTCAACGCAGGGGACC
CGGGCGGGGGCCCAGGCCGCGAACCGGCCGAGGGAGGGGGCTCTAGTGCC
CAACACCCAAATATGGCTCGAGAAGGGCAGCGACATTCCTGCGGGGTGGC
GCGGAGGGAATGCCCGCGGGCTATATAAAACCTGAGCAGAGGGACAAGCG
GCCACCGCAGCGGACAGCGCCACC ATGG
The promoter sequence itself is 479 bp:
(SEQ ID NO: 80)
TCTAGAAAATCTGAAAGGCATAGCCCCATATATCAGTGATATAAATAGAA
CCTGCAGCAGGCTCTGGTAAATGATGACTACAAGGTGGACTGGGAGGCAG
CCCGGCAATCTGAAAGGCATAGCCCCATATATCAGTGATATAAATAGAAC
CTGCAGCAGGCTCTGGTAAATGATGACTACAAGGTGGACTGGGAGGCAGC
CCGGCAGGAGGGGCAAACCCGCTAGGGAGACACTCCATATACGGCCCGGC
CCGCGTTACCTGGGACCGGGCCAACCCGCTCCTTCTTTGGTCAACGCAGG
GGACCCGGGCGGGGGCCCAGGCCGCGAACCGGCCGAGGGAGGGGGCTCTA
GTGCCCAACACCCAAATATGGCTCGAGAAGGGCAGCGACATTCCTGCGGG
GTGGCGCGGAGGGAATGCCCGCGGGCTATATAAAACCTGAGCAGAGGGAC
AAGCGGCCACCGCAGCGGACAGCGCCACC

### Example 3. New Approach for rAAV Delivery to Muscle

[0205] If both the heart and skeletal muscle are to be optimally targeted in rAAV gene delivery, then it would be best to deliver the cardiac rAAV and the skeletal muscle rAAV via the specific arterial beds for the muscles, rather than the intravenous delivery as is the common practice. This is accomplished using a drug delivery catheter that is introduced into the femoral artery and first advanced the heart. The cardiac rAAV is first delivered into the left and right coronary arteries. Following the cardiac rAAV delivery, the catheter is retracted to the aortic arch, where skeletal muscle-targeted rAAV is then delivered to the subclavian arteries and, if desired, the carotid arteries. The catheter is then retracted into the descending aorta, if desired, and the rest of the skeletal muscle rAAV is delivered via various descending aortic branches, depending on the desired skeletal muscle distribution.

[0206] To further enhance distribution of rAAV to skeletal muscle, a PDE5 inhibitor, such as sildenafil or tadalafil, is given 1 hour prior to rAAV delivery to increase blood flow to resting skeletal muscle. Additionally, inflation of a blood pressure cuff on each limb at a pressure below the systolic pressure and above the diastolyic pressure improves retention of virus in the limbs at the time of viral delivery.

### Example 4. Chimeric Utrophin/Dystrophin Micro-Dystrophin Constructs that are Optimized for Either Skeletal Muscle or Cardiac Muscle

[0207] There have been recent adverse events in the clinical trials using micro-dystrophins that are due to presentation of neoantigens in patients with deletions that include exons 3 to 11, which are present in all of the clinical trial micro-dystrophins. Two of the micro-dystrophins additionally present neoantigens that encompass exons 12-17. Since all DMD patients express utrophin and utrophin has two alternative actin binding N-termini following by three spectrin-like repeats that are similar to those of dystrophin, a chimeric micro-utrophin/dystrophin construct can be used in patients with N-terminal mutations in dystrophin, as well as other DMD patients as long as they are not deleted in any of the dystrophin regions present in the chimera.

[0208] Since the patients have mutations and deletions in different regions of dystrophin, there is the potential that for a given patient, a micro-dystrophin will present neoantigens, which leads to the possibility of an immune response against the expressed micro-dystrophin. With the exception of the extreme N-terminal and C-terminal mutations, it is possible to design micro-dystrophins that avoid neoantigen presentation for specific patient mutations. In the case of the N-terminal mutations, the use of the utrophin N-terminus will avoid neoantigen presentation and provide the needed actin binding. Thus, the micro-utrophin/dystrophin chimeras, and in particular any of constructs 14, 15, 16, and 17 listed in Table 6, can be used in almost all DMD patients without risk of a potential immune response.

[0209] In all cases, including the micro-dystrophins currently evaluated in clinical trials, the junctional peptide(s) created by splicing segments of utrophin or dystrophin to other segments of dystrophin is potentially a neoantigen and should be designed to minimize immunogenicity. There are two alternative utrophin N-terminal sequences expressed in mammals, which create different affinities for actin. Both can be utilized, but the form with the higher actin binding affinity is the form normally expressed in striated muscle and used in the sequences described in Tables 3-5. Examples of micro-dystrophins currently evaluated in clinical trials are PF-06939926 (Pfizer), SRP-9001-10 (Sarepta), and SGT-001 (Solid Bio).

[0210] Additionally, the loss of regulation of ion channels, including the TRPC1, 3, 6 channels, leads to residual pathology in skeletal and cardiac muscles that the micro-dystrophins currently in trials do not address. Accordingly, in some embodiments, regions in the C-terminus of dystrophin, including the syntrophin binding sites and the coiled coil regions that interact with dystrobrevin are included in the chimeric utrophin/dystrophin micro-dystrophin constructs if packaging size allows. The following chimeric utrophin/dystrophin micro-dystrophin constructs have been designed for AAV delivery that address the points described above.

[0211] To create the alternative utrophin N-terminus, the first 22 amino acids of the utrophin N-terminus are replaced with the alternative utrophin isoform sequence (27 amino acids) that weakens the actin binding:

(SEQ ID NO: 249)
MAKYGEHEASPDNGQNEFSDII →
(SEQ ID NO: 250)
MSGLAATTFHWKKCRLDLPGHVALQAC

TABLE 3
Chimeric Utrophin/Dystrophin Micro-dystrophin Constructs
that are Optimized for Cardiac Muscle for Patients
with N-terminal Mutations Prior to Exon 17

| | Size (amino |
|---|---|
| Elements included in construct | acid number) |
| 1) Nterm-R1 of Utrophin_Dystrophin R17-R19_R24 + | 1245 |
| H4 + trCterm | |
| 2) Nterm-R1 of utrophin_Dystrophin R17-R19_H4 to 1^{st} | 1389 |
| coiled coil and proline rich region that follows | |
| 3) Nterm-R1 of utrophin_Dystrophin R17-R19_R24 | 1326 |
| to end of syntrophin region | |

[0212] For patients with mutations after exon 13 but before exon 45, any of the micro-dystrophins disclosed herein can be used without the possibility of neoantigen presentation. This is because there is an alternative promoter that expresses the dystrophin-related protein, Dp140, that includes exon 45 and beyond. For patients with deletions after exon 43 and before exon 56, the Dp116 coding sequence includes all of repeat 23 and beyond.

[0213] While these patients can accept the dystrophin N-terminal region, a sequence of a chimeric utrophin/dystrophin micro-dystrophin that was developed for use in any patient with a mutation prior to exon 56 is shown below.

TABLE 4
Chimeric Utrophin/Dystrophin Micro-dystrophin Constructs
that are Optimized for Cardiac Muscle for Patients with
N-terminal Mutations After Exon 43 and Prior to Exon 56

| | Size (amino |
|---|---|
| Elements included in construct | acid number) |
| 4) Utrophin N-terminus through R1_R23 to end of | 1319 |
| dystrophin | |

TABLE 5
Chimeric Utrophin/Dystrophin Micro-dystrophin Constructs
that are Optimized for Skeletal Muscle for Patients
with Mutations/Deletions Before Exon 13

| | Size (amino |
|---|---|
| Elements included in construct | acid number) |
| 5) Utrophin Nterm-R2_Dystrophin R16-R17_R24 + | 1259 |
| H4 + trCterm | |
| 6) Utrophin Nterm-Dystrophin R2_R16-R17_H4 to | 1219 |
| end of syntrophin region | |
| 7) Utrophin Nterm-R2_Dystrophin R16-R17_H4 to 1^{st} | 1382 |
| coiled coil and proline rich region that follows | |
| 8) Utrophin Nterm-R1_Dystrophin R16-R17; R23 to | 1352 |
| end of syntrophin region | |
| 9) Utrophin Nterm-R2_Dystrophin R16-R17_R24 + | 1343 |
| H4 to end of syntrophin region | |
| 10) Utrophin Nterm-R2_Dystrophin R23 + R24 + | 1217 |
| H4 to end of syntrophin region | |
| 11) N-terminus through R2; R23 to end of 1st Coiled | 1264 |
| Coil | |
| 12) Utrophin Nterm-R3_Dystrophin R23 + R24 + | 1330 |
| H4 to end of syntrophin region | |
| 13) Utrophin N-terminus through R2; Dystrophin R23 | 1414 |
| to end | |

TABLE 6
Chimeric Utrophin/Dystrophin Micro-dystrophin Constructs
that are Optimized for Skeletal Muscle for Patients
with Mutations/Deletions Before Exon 59

| | Size (amino |
|---|---|
| Elements included in construct | acid number) |
| 14) Utrophin N-terminus through R3; Dystrophin R24 | 1403 |
| to end | |
| 15) Utrophin Nterm-R3_Dystrophin R24 + H4 to end | 1208 |
| of syntrophin region | |
| 16) Utrophin Nterm-R3_Dystrophin R24 + H4 to to | 1271 |
| 1st coiled coil and proline rich region that follows | |
| 17) Utrophin Nterm-H2_Dystrophin R24 + H4 to end | 1240 |
| of syntrophin region | |
| 18) Utrophin N-terminus through H2; Dystrophin R24 | 1435 |
| to end | |

TABLE 7
Chimeric Utrophin/Dystrophin Micro-dystrophin Constructs
that are Optimized for Skeletal Muscle for Patients
with Mutations/Deletions Before Exon 57

| | Size (amino |
|---|---|
| Elements included in construct | acid number) |
| 19) Utrophin N-terminus through R3; Dystrophin R23 | 1525 |
| to end | |
| 20) Utrophin Nterm-R3_Dystrophin R23 + H4 to to 1st | 1393 |
| coiled coil and proline rich region that follows | |

TABLE 8
Additional micro-dystrophins and chimeric utrophin/dystrophin
micro-dystrophins for use in both heart and skeletal muscle.

| | |
|---|---|
| | Size (amino |
| Elements included in construct | acid number) |

Micro-dystrophins

| | |
|---|---|
| 21) Nterm-R2_R17_H3_R22_H4-trCterm + SynBS | 1287 |
| 22) Nterm-R1_R17_H3_R21-R22_H4-trCterm + SynBS | 1287 |
| 23) Nterm-R2_R17_H3_R22_H4-trCterm + SynBS + coiled coil | 1350 |
| 24) Nterm-R1_R17_H3_R21-R22_H4-trCterm + SynBS + coiled coil | 1350 |
| 25) Nterm-R2_R17_R21-R22_H4-trCterm + SynBS | 1366 |

Micro-utrophin-dystrophin chimeras

| | |
|---|---|
| 26) UtroNterm-R2_DystroR17_H3_R22_H4-trCterm + SynBS | 1274 |
| 27) UtroNterm-R1_DystroR17_H3_R21-R22_H4-trCterm + SynBS | 1272 |
| 28) UtroNterm-R2_DystroR17_H3_R22_H4-trCterm + SynBS_coiled coil | 1337 |
| 29) UtroNterm-R1_DystroR17_H3_R21-R22_H4-trCterm + SynBS_coiled coil | 1335 |
| 30) UtroNterm-R2_DystroR17_R21-R22_H4-trCterm + SynBS | 1353 |

[0214] The amino acid sequences of modules to build the chimeric utrophin/dystrophin micro-dystrophin proteins described in this example are provided below as SEQ ID NOS: 191-213. The amino acid sequences of the micro-dystrophin constructs in Tables 3-8 are provided as SEQ ID NOs: 81-84, 93-101, and 149-165 elsewhere in the description. In some embodiments, the present disclosure provides chimeric utrophin/micro-dystrophin proteins comprising one or more amino acid sequences selected from the group consisting of SEQ ID NOs: 191-213.

[0215] In some aspects, the present disclosure provides cells and compositions comprising any of the disclosed chimeric proteins, recombinant nucleic acids, rAAV vectors, or rAAV particles. In some embodiments, the cell is a mammalian cell, such as a human cell. In some embodiments, disclosed herein are cells comprising chimeric proteins having an amino acid sequence comprising at least 90%, 95%, 98%, or 99% sequence identity to of any one of SEQ ID NOs: 81-84, 93-101, and 149-165. In particular embodiments, the cells comprise proteins encoded by a nucleic acid that comprises at least 80% sequence identity, such as 100% identity, to the nucleotide sequence of any one of SEQ ID NOs: 85-92. In some aspects, the present disclosure provides cells and compositions comprising recombinant nucleic acids or rAAV vectors comprising any of the nucleic acid sequences of SEQ ID NOs: 7-12, 22-39, 126-131, 133-148, 166-185. In some aspects, the present disclosure provides cells and compositions comprising recombinant nucleic acids or rAAV vectors comprising any of the nucleic acid sequences of SEQ ID NOs: 70, 72, and 207-247. In some aspects, the present disclosure provides cells and compositions comprising recombinant nucleic acids or rAAV vectors comprising any of the nucleic acid sequences comprising at least 80%, 90%, or greater than 90% identity to any of SEQ ID NOs: 7-12, 22-39, 85-92, 126-131, 133-148, 166-185; 70, 72, and 207-247.

[0216] In particular embodiments, cells, compositions, and rAAV particles that comprise an rAAV vector that comprises a nucleic acid sequence encoding a chimeric protein that contains a utrophin N-terminal domain ending at utrophin spectrin-like repeat 2 connected to a dystrophin C-terminal domain containing spectrin-like repeat 23 through the C-terminus.

### Additional Studies

[0217] The degeneration, or loss, of full-length dystrophin protein in DMD patients leaves the dystrophic muscle more susceptible to being damaged when contracting, which in turn causes breakdown of the muscle. Replacement micro-dystrophin gene therapies may be evaluated for their ability to protect the muscle against contraction-induced injury. This protection can be assessed by examining (i) the loss of creatine kinase (CK) from the muscle fibers due to membrane leakage and/or (ii) the loss of force generation due to muscle damage³. The metric of specific tension or specific force (SP₀), i.e. force per cross-sectional area, has been classically used to measure the strength of muscle fibers. Another metric is maximal absolute force generation. These experiments make use of eccentric, or lengthening, contractions to determine changes in muscle membrane integrity, which is deficient in Duchenne muscular dystrophy, and the mouse model for this disease (mdx).

[0218] Herein, published protocols were used to compare the amount of protection conferred by an exemplary microdystrophin/utrophin chimera with those conferred by clinical micro-dystrophin constructs shown in the schematic of FIG. 3. These include PF-06939926 (Pfizer), SRP-9001-10 (Sarepta), and SGT-001 (Solid Bio). The chimera evaluated was the chimera that contains the N terminus of utrophin, ending at utrophin repeat 2, to dystrophin repeat 23, through the C-terminal syntrophin binding sites of dystrophin. These C-terminal syntrophin binding sites are missing in each of the clinical micro-dystrophin constructs. The results of these experiments are shown in FIGS. 4-7. The chimeric molecule was delivered to the skeletal muscle tissues of mice by AAV particles.

[0219] AAV particles were injected (via tail vein) at a dosage of 2×10¹⁴ vector genomes/kg into 5-week-old male D2.mdx mice (dystrophin-deficient mice in a DBA2/J genetic background). In parallel, D2.mdx. mice were also treated with three other micro-dystrophin constructs: PF-06939926, SRP-9001-10, and SGT-001. Subsets of mice were sacrificed at 9 weeks of age, or 16 weeks of age, to analyze the degree of skeletal muscle protection (skeletal muscle functional loss of function is apparent by this time).

[0220] CK activity is assessed in FIG. 5 at 2 months following injections. The chimeric molecule provided the greatest protection against loss of CK from muscle fibers. Results further indicate improved maintenance of force production in diaphragm and extensor digitorum longus (EDL) muscles.

[0221] In particular, FIG. 6 shows the loss of force generation due to eccentric muscle damage. As shown in this figure, the chimera provides as much protection against contraction-induced injury as the micro-dystrophin construct, and protects more protection than control/null. AAV-delivery of either the micro-dystrophin or the micro-utrophin/dystrophin chimera may improve the force towards normal.

### REFERENCES CITED, EXAMPLE 4

[0222] Hoffman, E. P., Brown, R. H., Jr. & Kunkel, L. M. Dystrophin: the protein product of the Duchenne muscular dystrophy locus. Cell 51, 919-928 (1987).
[0223] Petrof, B. J., Shrager, J. B., Stedman, H. H., Kelly, A. M. & Sweeney, H. L. Dystrophin protects the sarcolemma from stresses developed during muscle contraction. Proc Natl Acad Sci USA 90, 3710-3714 (1993).
[0224] Wang, B., Li, J. & Xiao, X. Adeno-associated virus vector carrying human minidystrophin genes effectively ameliorates muscular dystrophy in mdx mouse model. Proc Natl Acad Sci USA 97, 13714-13719, doi: 10.1073/pnas.240335297 (2000).
[0225] Harper, S. Q. et al. Modular flexibility of dystrophin: implications for gene therapy of Duchenne muscular dystrophy. Nat Med 8, 253-261, doi: 10.1038/nm0302-253 (2002).
[0226] Hakim, C. H. et al. A Five-Repeat Micro-Dystrophin Gene Ameliorated Dystrophic Phenotype in the Severe DBA/2J-mdx Model of Duchenne Muscular Dystrophy. Mol Ther Methods Clin Dev 6, 216-230, doi: 10.1016/j.omtm.2017.06.006 (2017).

Listing of sequences for Example 4
Utrophin N-terminus (310 amino acids)
(SEQ ID NO: 191)
MAKYGEHEASPDNGQNEFSDIIKSRSDEHNDVQKKTFTKWINARFSKSGKPPINDMFTDLKDGRKLLDLLEGLTG
TSLPKERGSTRVHALNNVNRVLQVLHQNNVELVNIGGTDIVDGNHKLTLGLLWSIILHWQVKDVMKDVMSDLQQT
NSEKILLSWVRQTTRPYSQVNVLNFTTSWTDGLAFNAVLHRHKPDLFSWDKVVKMSPIERLEHAFSKAQTYLGIE
KLLDPEDVAVQLPDKKSIIMYLTSLFEVLPQQVTIDAIREVETLPRKYKKECEEEAINIQSTAPEEEHESPRAET
PSTVTEVDMD
Utrophin Repeat 1 (122 amino acids)
(SEQ ID NO: 192)
LDSYQIALEEVLTWLLSAEDTFQEQDDISDDVEEVKDQFATHEAFMMELTAHQSSVGSVLQAGNQLITQGTLSDE
EEFEIQEQMTLLNARWEALRVESMDRQSRLHDVLM
Utrophin Repeat 2 (107 amino acids)
(SEQ ID NO: 193)
ELQKKQLQQLSAWLTLTEERI QKMETCPLDDDVKSLQKLLEEHKSLQSDLEAEQVKVNSLTHMVVIVDENSGESA
TAILEDQLQKLGERWTAVCRWTEERWNRLQEI
Utrophin Repeat 3 (111 amino acids)
(SEQ ID NO: 194)
NILWQELLEEQCLLKAWLTEKEEALNKVQTSNFKDQKELSVSVRRLAILKEDMEMKRQTLDQLSEI GQDVGQLLD
NSKASKKINSDSEELTQRWDSLVQRLEDSSNQVTQA
Utrophin Hinge 2 (32 amino acids)
(SEQ ID NO: 195)
VAKLGMSQIPQKDLLETVRVREQAITKKSKQE
Linker (not found in Utrophin or Dystrophin)
(SEQ ID NO: 196)
AASA
Dystrophin Repeat 16 (116 amino acids)
(SEQ ID NO: 197)
[sequence omitted]
Dystrophin Repeat 17 (110 amino acids) in constructs 1-3 and 5-9
(SEQ ID NO: 198)
RSVEKWRRFHYDIKIFNQWLTEAEQFLRKTQIPENWEHAKYKWYLKELQDGIGQRQTVVRTLNATGEEII
QQSSKTDASILQEKLGSLNLRWQEVCKQLSDRKKRLEEQK
Dystrophin Repeat 18-Repeat 19 (214 amino acids)
(SEQ ID NO: 199)
NILSEFQRDLNEFVLWLEEADNIASIPLEPGKEQQLKEKLEQVKLLVEELPLRQGILKQLNETGGPVLVSAPISP
EEQDKLENKLKQTNLQWIKVSRALPEKQGEIEAQIKDLGQLEKKLEDLEEQLNHLLLWLSPIRNQLEIYNQPNQE
GPFDVKETEIAVQAKQPDVEEILSKGQHLYKEKPATQPVKRKLEDLSSEWKAVNRLLQELRAKQ
Dystrophin Repeat 23 (122 amino acids)
(SEQ ID NO: 200)
SSDQWKRLHLSLQELLVWLQLKDDELSRQAPIGGDFPAVQKQNDVHRAFKRELKTKEPVIMSTLETVRIFLTEQP
LEGLEKLYQEPRELPPEERAQNVTRLLRKQAEEVNTEWEKLNLHSAD
Dystrophin Repeat 24 (121 amino acids) in constructs 1, 3-5 and 8-13
(SEQ ID NO: 48)
WQRKIDETLERLQELQEATDELDLKLRQAEVIKGSWQPVGDLLIDSLQDHLEKVKALRGEIAPLKENVSHVNDLA
RQLTTLGIQLSPYNLSTLEDLNTRWKLLQVAVEDRVRQLHEAHRDF
Dystrophin Repeat 24 (120 amino acids) in constructs 14-20
(SEQ ID NO: 201)
QRKIDETLERLQELQEATDELDLKLRQAEVIKGSWQPVGDLLIDSLQDHLEKVKALRGEIAPLKENVSHVNDLAR
QLTTLGIQLSPYNLSTLEDLNTRWKLLQVAVEDRVRQLHEAHRDF
Dystrophin Hinge 4 + truncated C terminus (364 amino acids)
(SEQ ID NO: 202)
GPASQHFLSTSVQGPWERAISPNKVPYYINHETQTTCWDHPKMTELYQSLADLNNVRESAYRTAMKLRRLQKALC
LDLLSLSAACDALDQHNLKQNDQPMDILQIINCLTTIYDRLEQEHNNLVNVPLCVDMCLNWLLNVYDTGRTGRIR
VLSFKTGIISLCKAHLEDKYRYLFKQVASSTGFCDQRRLGLLLHDSIQIPRQLGEVASEGGSNIEPSVRSCFQFA
NNKPEIEAALFLDWMRLEPQSMVWLPVLHRVAAAETAKHQAKCNICKECPIIGFRYRSLKHENYDICQSCFFSGR
VAKGHKMHYPMVEYCTPTTSGEDVRDFAKVLKNKFRTKRYFAKHPRMGYLPVQTVLEGDNMETP
Syntrophin binding sites (81 amino acids)
(SEQ ID NO: 50)
VTLINFWPVDSAPASSPQLSHDDTHSRIEHYASRLAEMENSNGSYLNDSISPNESIDDEHLLIQHYCQSLNQDSP
LSQPRS
1st coiled coil adds 63aa; including proline rich region (63 amino acids)
(SEQ ID NO: 51)
PAQILISLESEERGELERILADLEEENRNLQAEYDRLKQQHEHKGLSPLPSPPEMMPTSPQSP
2nd coiled coil region to end of dystrophin (132 amino acids)
(SEQ ID NO: 52)
RDAELIAEAKLLRQHKGRLEARMQILEDHNKQLESQLHRLRQLLEQPQAEAKVNGTTVSSPSTSLQRSDSSQPML
LRVVGSQTSDSMGEEDLLSPPQDTSTGLEEVMEQLNNSFPSSRGRNTPGKPMREDTM
Nterm (325 amino acids)
(SEQ ID NO: 203)
MLWWEEVEDCYEREDVQKKTFTKWVNAQFSKFGKQHIENLFSDLQDGRRLLDLLEGLTGQKLPKEKGSTRVHALN
NVNKALRVLQNNNVDLVNIGSTDIVDGNHKLTLGLIWNIILHWQVKNVMKNIMAGLQQTNSEKILLSWVRQSTRN
YPQVNVINFTTSWSDGLALNALIHSHRPDLFDWNSVVCQQSATQRLEHAFNIARYQLGIEKLLDPEDVDTTYPDK
KSILMYITSLFQVLPQQVSIEAIQEVEMLPRPPKVTKEEHFQLHHQMHYSQQITVSLAQGYERTSSPKPRFKSYA
YTQAAYVTTSDPTRSPFPSQHLEAP
Repeat 1 (126 amino acids)
(SEQ ID NO: 41)
EDKSFGSSLMESEVNLDRYQTALEEVLSWLLSAEDTLQAQGEISNDVEVVKDQFHTHEGYMMDLTAHQGRVGNIL
QLGSKLIGTGKLSEDEETEVQEQMNLLNSRWECLRVASMEKQSNLHRVLMD
Repeat 2 (105 amino acids)
(SEQ ID NO: 42)
LQNQKLKELNDWLTKTEERTRKMEEEPLGPDLEDLKRQVQQHKVLQEDLEQEQVRVNSLTHMVVVVDESSGDHAT
AALEEQLKVLGDRWANICRWTEDRWVLLQD
Dystrophin R17 (113 amino acids) in constructs 21-30
(SEQ ID NO: 45)
RFDRSVEKWRRFHYDIKIFNQWLTEAEQFLRKTQIPENWEHAKYKWYLKELQDGIGQRQTVVRTLNATGEEIIQQ
SSKTDASILQEKLGSLNLRWQEVCKQLSDRKKRLEEQK
Hinge 3 (47 amino acids)
(SEQ ID NO: 204)
QPDLAPGLTTIGASPTQTVTLVTQPVVTKETAISKLEMPSSLMLEVP
Repeat 21 (105 amino acids)
(SEQ ID NO: 205)
KDSTQWLEAKEEAEQVLGQARAKLESWKEGPYTVDAIQKKITETKQLAKDLRQWQTNVDVANDLALKLLRDYSAD
DTRKVHMITENINASWRSIHKRVSEREAAL
Repeat 22 + linker (126 amino acids)
(SEQ ID NO: 206)
EETHRLLQQFPLDLEKFLAWLTEAETTANVLQDATRKERLLEDSKGVKELMKQWQDLQGEIEAHTDVYHNLDENS
QKILRSLEGSDDAVLLQRRLDNMNFKWSELRKKSLNIRSHLEASSDQWKRL

[0227] The nucleotide sequences of modules used to build the chimeric utrophin/dystrophin micro-dystrophin proteins described in this Example are provided below as SEQ ID NOs: 207-247. The nucleotide sequences of the micro-dystrophin constructs in Tables 3-8 are provided as SEQ ID Nos. 85-92, 102-119, 135-148 and 166-185 elsewhere in the description. In some embodiments, the present disclosure provides nucleic acid constructs comprising one or more of SEQ ID NOs: 70, 72, and 207-247. The present disclosure further provides nucleic acid constructs that comprise at least two, at least three, at least four, or at least five nucleotide sequences of any one of SEQ ID NOs: 70, 72, and 207-247. The present disclosure further provides nucleic acid constructs that comprise at least six, at least seven, at least eight, or more than eight nucleotide sequences of any one of SEQ ID NOs: 70, 72, and 207-247.

Utrophin N-terminus
Human Sequences without codon alterations:
(SEQ ID NO: 207)
ATGGCCAAGTATGGAGAACATGAAGCCAGTCCTGACAATGGGCAGAACGAATTCAGTGATATCATTAAGTCCAGA
TCTGATGAACACAATGACGTACAGAAGAAAACCTTTACCAAATGGATAAATGCTCGATTTTCAAAGAGTGGGAAA
CCACCCATCAATGATATGTTCACAGACCTCAAAGATGGAAGGAAGCTATTGGATCTTCTAGAAGGCCTCACAGGA
ACATCACTGCCAAAGGAACGTGGTTCCACAAGGGTACATGCCTTAAATAACGTCAACAGAGTGCTGCAGGTTTTA
CATCAGAACAATGTGGAATTAGTGAATATAGGGGGAACTGACATTGTGGATGGAAATCACAAACTGACTTTGGGG
TTACTTTGGAGCATCATTTTGCACTGGCAGGTGAAAGATGTCATGAAGGATGTCATGTCGGACCTGCAGCAGACG
AACAGTGAGAAGATCCTGCTCAGCTGGGTGCGTCAGACCACCAGGCCCTACAGCCAAGTCAACGTCCTCAACTTC
ACCACCAGCTGGACAGATGGACTCGCCTTTAATGCTGTCCTCCACCGACATAAACCTGATCTCTTCAGCTGGGAT
AAAGTTGTCAAAATGTCACCAATTGAGAGACTTGAACATGCCTTCAGCAAGGCTCAAACTTATTTGGGAATTGAA
AAGCTGTTAGATCCTGAAGATGTTGCCGTTCAGCTTCCTGACAAGAAATCCATAATTATGTATTTAACATCTTTG
TTTGAGGTGCTACCTCAGCAAGTCACCATAGACGCCATCCGTGAGGTAGAGACACTCCCAAGGAAATATAAAAAA
GAATGTGAAGAAGAGGCAATTAATATACAGAGTACAGCGCCTGAGGAGGAGCATGAGAGTCCCCGAGCTGAAACT
CCCAGCACTGTCACTGAGGTTGACATGGAT
Human Sequences with codon optimization:
(SEQ ID NO: 208)
ATGGCCAAGTACGGCGAGCACGAGGCCAGCCCCGACAACGGCCAGAACGAGTTCAGCGACATCATCAAGAGCCGG
AGCGACGAGCACAACGACGTGCAGAAGAAGACCTTCACCAAGTGGATCAACGCCCGGTTCAGCAAGAGCGGCAAG
CCCCCCATCAACGACATGTTCACCGACCTGAAGGACGGCCGGAAGCTGCTGGACCTGCTGGAGGGCCTGACCGGC
ACCAGCCTGCCCAAGGAGCGGGGCAGCACCCGGGTGCACGCCCTGAACAACGTGAACCGGGTGCTGCAGGTGCTG
CACCAGAACAACGTGGAGCTGGTGAACATCGGCGGCACCGACATCGTGGACGGCAACCACAAGCTGACCCTGGGC
CTGCTGTGGAGCATCATCCTGCACTGGCAGGTGAAGGACGTGATGAAGGACGTGATGAGCGACCTGCAGCAGACC
AACAGCGAGAAGATCCTGCTGAGCTGGGTGCGGCAGACCACCCGGCCCTACAGCCAGGTGAACGTGCTGAACTTC
ACCACCAGCTGGACCGACGGCCTGGCCTTCAACGCCGTGCTGCACCGGCACAAGCCCGACCTGTTCAGCTGGGAC
AAGGTGGTGAAGATGAGCCCCATCGAGCGGCTGGAGCACGCCTTCAGCAAGGCCCAGACCTACCTGGGCATCGAG
AAGCTGCTGGACCCCGAGGACGTGGCCGTGCAGCTGCCCGACAAGAAGAGCATCATCATGTACCTGACCAGCCTG
TTCGAGGTGCTGCCCCAGCAGGTGACCATCGACGCCATCCGGGAGGTGGAGACCCTGCCCCGGAAGTACAAGAAG
GAGTGCGAGGAGGAGGCCATCAACATCCAGAGCACCGCCCCCGAGGAGGAGCACGAGAGCCCCCGGGCCGAGACC
CCCAGCACCGTGACCGAGGTGGACATGGAC
Utrophin Repeat 1
Human Sequences without codon alterations:
(SEQ ID NO: 209)
CTGGACAGCTATCAGATTGCGTTGGAGGAAGTGCTGACCTGGTTGCTTTCTGCTGAGGACACTTTCCAGGAGCAG
GATGATATTTCTGATGATGTTGAAGAAGTCAAAGACCAGTTTGCAACCCATGAAGCTTTTATGATGGAACTGACT
GCACACCAGAGCAGTGTGGGCAGCGTCCTGCAGGCAGGCAACCAACTGATAACACAAGGAACTCTGTCAGACGAA
GAAGAATTTGAGATTCAGGAACAGATGACCCTGCTGAATGCTAGATGGGAGGCTCTTAGGGTGGAGAGTATGGAC
AGACAGTCCCGGCTGCACGATGTGCTGATG
Human Sequences with codon optimization:
(SEQ ID NO: 210)
CTGGACAGCTACCAGATCGCCCTGGAGGAGGTGCTGACCTGGCTGCTGAGCGCCGAGGACACCTTCCAGGAGCAG
GACGACATCAGCGACGACGTGGAGGAGGTGAAGGACCAGTTCGCCACCCACGAGGCCTTCATGATGGAGCTGACC
GCCCACCAGAGCAGCGTGGGCAGCGTGCTGCAGGCCGGCAACCAGCTGATCACCCAGGGCACCCTGAGCGACGAG
GAGGAGTTCGAGATCCAGGAGCAGATGACCCTGCTGAACGCCCGGTGGGAGGCCCTGCGGGTGGAGAGCATGGAC
CGGCAGAGCCGGCTGCACGACGTGCTGATG
Utrophin Repeat 2
Human Sequences without codon alterations:
(SEQ ID NO: 211)
GAACTGCAGAAGAAGCAACTGCAGCAGCTCTCCGCCTGGTTAACACTCACAGAGGAGCGCATTCAGAAGATGGAA
ACTTGCCCCCTGGATGATGATGTAAAATCTCTACAAAAGCTGCTAGAAGAACATAAAAGTTTGCAAAGTGATCTT
GAGGCTGAACAGGTGAAAGTAAATTCACTAACTCACATGGTGGTCATTGTTGATGAAAACAGTGGTGAGAGTGCT
ACAGCTATCCTAGAAGACCAGTTACAGAAACTTGGTGAGCGCTGGACAGCAGTATGCCGTTGGACTGAAGAACGC
TGGAATAGGTTACAAGAAATC
Human Sequences with codon optimization:
(SEQ ID NO: 212)
GAGCTGCAGAAGAAGCAGCTGCAGCAGCTGAGCGCCTGGCTGACCCTGACCGAGGAGCGGATCCAGAAGATGGAG
ACCTGCCCCCTGGACGACGACGTGAAGAGCCTGCAGAAGCTGCTGGAGGAGCACAAGAGCCTGCAGAGCGACCTG
GAGGCCGAGCAGGTGAAGGTGAACAGCCTGACCCACATGGTGGTGATCGTGGACGAGAACAGCGGCGAGAGCGCC
ACCGCCATCCTGGAGGACCAGCTGCAGAAGCTGGGCGAGCGGTGGACCGCCGTGTGCCGGTGGACCGAGGAGCGG
TGGAACCGGCTGCAGGAGATC
Utrophin Repeat 3
Human Sequences without codon alterations:
(SEQ ID NO: 213)
AATATATTGTGGCAGGAATTATTGGAAGAACAGTGCTTGTTGAAAGCTTGGTTAACCGAAAAAGAAGAGGCTTTA
AATAAAGTCCAGACAAGCAACTTCAAAGACCAAAAGGAACTAAGTGTCAGTGTTCGACGTCTGGCTATTTTGAAG
GAAGACATGGAAATGAAGCGTCAAACATTGGATCAGCTGAGTGAGATTGGCCAGGATGTGGGACAATTACTTGAT
AATTCCAAGGCATCTAAGAAGATCAACAGTGACTCAGAGGAACTGACTCAAAGATGGGATTCTTTGGTTCAGAGA
CTAGAAGATTCCTCCAACCAGGTGACTCAGGCT
Human Sequences with codon optimization:
(SEQ ID NO: 214)
AACATCCTGTGGCAGGAGCTGCTGGAGGAGCAGTGCCTGCTGAAGGCCTGGCTGACCGAGAAGGAGGAGGCCCTG
AACAAGGTGCAGACCAGCAACTTCAAGGACCAGAAGGAGCTGAGCGTGAGCGTGCGGCGGCTGGCCATCCTGAAG
GAGGACATGGAGATGAAGCGGCAGACCCTGGACCAGCTGAGCGAGATCGGCCAGGACGTGGGCCAGCTGCTGGAC
AACAGCAAGGCCAGCAAGAAGATCAACAGCGACAGCGAGGAGCTGACCCAGCGGTGGGACAGCCTGGTGCAGCGG
CTGGAGGACAGCAGCAACCAGGTGACCCAGGCC
Utrophin Hinge 2
Human Sequences without codon alterations:
(SEQ ID NO: 215)
GTAGCAAAGCTGGGGATGTCTCAGATTCCTCAGAAGGACCTTTTGGAGACTGTTCGTGTAAGAGAACAAGCAATT
ACAAAAAAATCTAAGCAGGAA
Human Sequences with codon optimization:
(SEQ ID NO: 216)
GTGGCCAAGCTGGGCATGAGCCAGATCCCCCAGAAGGACCTGCTGGAGACCGTGCGGGTGCGGGAGCAGGCCATC
ACCAAGAAGAGCAAGCAGGAG
Linker (no native sequence in Utrophin or Dystrophin)
(SEQ ID NO: 217)
GCCGCTAGCGCC
Dystrophin Repeat 16
Human Sequences without codon alterations:
(SEQ ID NO: 218)
ATGATGGTGATGACTGAAGACATGCCTTTGGAAATTTCTTATGTGCCTTCTACTTATTTGACTGAAATCACTCAT
GTCTCACAAGCCCTATTAGAAGTGGAACAACTTCTCAATGCTCCTGACCTCTGTGCTAAGGACTTTGAAGATCTC
TTTAAGCAAGAGGAGTCTCTGAAGAATATAAAAGATAGTCTACAACAAAGCTCAGGTCGGATTGACATTATTCAT
AGCAAGAAGACAGCAGCATTGCAAAGTGCAACGCCTGTGGAAAGGGTGAAGCTACAGGAAGCTCTCTCCCAGCTT
GATTTCCAATGGGAAAAAGTTAACAAAATGTACAAGGACCGACAAGGG
Human Sequences with codon optimization:
(SEQ ID NO: 219)
ATGATGGTGATGACCGAGGACATGCCCCTGGAGATCAGCTACGTGCCCAGCACCTACCTGACCGAGATCACCCAC
GTGAGCCAGGCCCTGCTGGAGGTGGAGCAGCTGCTGAACGCCCCCGACCTGTGCGCCAAGGACTTCGAGGACCTG
TTCAAGCAGGAGGAGAGCCTGAAGAACATCAAGGACAGCCTGCAGCAGAGCAGCGGCCGGATCGACATCATCCAC
AGCAAGAAGACCGCCGCCCTGCAGAGCGCCACCCCCGTGGAGCGGGTGAAGCTGCAGGAGGCCCTGAGCCAGCTG
GACTTCCAGTGGGAGAAGGTGAACAAGATGTACAAGGACCGGCAGGGC
Dystrophin Repeat 17 (in constructs 5-9)
Human Sequences without codon alterations:
(SEQ ID NO: 220)
CGATTTGACAGATCTGTTGAGAAATGGCGGCGTTTTCATTATGATATAAAGATATTTAATCAGTGGCTAACAGAA
GCTGAACAGTTTCTCAGAAAGACACAAATTCCTGAGAATTGGGAACATGCTAAATACAAATGGTATCTTAAGGAA
CTCCAGGATGGCATTGGGCAGCGGCAAACTGTTGTCAGAACATTGAATGCAACTGGGGAAGAAATAATTCAGCAA
TCCTCAAAAACAGATGCCAGTATTCTACAGGAAAAATTGGGAAGCCTGAATCTGCGGTGGCAGGAGGTCTGCAAA
CAGCTGTCAGACAGAAAAAAGAGGCTAGAAGAACAAAAG
Human Sequences with codon optimization:
(SEQ ID NO: 221)
CGGTTCGACCGGAGCGTGGAGAAGTGGCGGCGGTTCCACTACGACATCAAGATCTTCAACCAGTGGCTGACCGAG
GCCGAGCAGTTCCTGCGGAAGACCCAGATCCCCGAGAACTGGGAGCACGCCAAGTACAAGTGGTACCTGAAGGAG
CTGCAGGACGGCATCGGCCAGCGGCAGACCGTGGTGCGGACCCTGAACGCCACCGGCGAGGAGATCATCCAGCAG
AGCAGCAAGACCGACGCCAGCATCCTGCAGGAGAAGCTGGGCAGCCTGAACCTGCGGTGGCAGGAGGTGTGCAAG
CAGCTGAGCGACCGGAAGAAGCGGCTGGAGGAGCAGAAG
Dystrophin Repeat 17-Repeat 19
Human Sequences without codon alterations:
(SEQ ID NO: 222)
AGATCTGTTGAGAAATGGCGGCGTTTTCATTATGATATAAAGATATTTAATCAGTGGCTAACAGAAGCTGAACAG
TTTCTCAGAAAGACACAAATTCCTGAGAATTGGGAACATGCTAAATACAAATGGTATCTTAAGGAACTCCAGGAT
GGCATTGGGCAGCGGCAAACTGTTGTCAGAACATTGAATGCAACTGGGGAAGAAATAATTCAGCAATCCTCAAAA
ACAGATGCCAGTATTCTACAGGAAAAATTGGGAAGCCTGAATCTGCGGTGGCAGGAGGTCTGCAAACAGCTGTCA
GACAGAAAAAAGAGGCTAGAAGAACAAAAGAATATCTTGTCAGAATTTCAAAGAGATTTAAATGAATTTGTTTTA
TGGTTGGAGGAAGCAGATAACATTGCTAGTATCCCACTTGAACCTGGAAAAGAGCAGCAACTAAAAGAAAAGCTT
GAGCAAGTCAAGTTACTGGTGGAAGAGTTGCCCCTGCGCCAGGGAATTCTCAAACAATTAAATGAAACTGGAGGA
CCCGTGCTTGTAAGTGCTCCCATAAGCCCAGAAGAGCAAGATAAACTTGAAAATAAGCTCAAGCAGACAAATCTC
CAGTGGATAAAGGTTTCCAGAGCTTTACCTGAGAAACAAGGAGAAATTGAAGCTCAAATAAAAGACCTTGGGCAG
CTTGAAAAAAAGCTTGAAGACCTTGAAGAGCAGTTAAATCATCTGCTGCTGTGGTTATCTCCTATTAGGAATCAG
TTGGAAATTTATAACCAACCAAACCAAGAAGGACCATTTGACGTTAAGGAAACTGAAATAGCAGTTCAAGCTAAA
CAACCGGATGTGGAAGAGATTTTGTCTAAAGGGCAGCATTTGTACAAGGAAAAACCAGCCACTCAGCCAGTGAAG
AGGAAGTTAGAAGATCTGAGCTCTGAGTGGAAGGCGGTAAACCGTTTACTTCAAGAGCTGAGGGCAAAGCAG
Human Sequences with codon optimization:
(SEQ ID NO: 223)
CGGAGCGTGGAGAAGTGGCGGCGGTTCCACTACGACATCAAGATCTTCAACCAGTGGCTGACCGAGGCCGAGCAG
TTCCTGCGGAAGACCCAGATCCCCGAGAACTGGGAGCACGCCAAGTACAAGTGGTACCTGAAGGAGCTGCAGGAC
GGCATCGGCCAGCGGCAGACCGTGGTGCGGACCCTGAACGCCACCGGCGAGGAGATCATCCAGCAGAGCAGCAAG
ACCGACGCCAGCATCCTGCAGGAGAAGCTGGGCAGCCTGAACCTGCGGTGGCAGGAGGTGTGCAAGCAGCTGAGC
GACCGGAAGAAGCGGCTGGAGGAGCAGAAGAACATCCTGAGCGAGTTCCAGCGGGACCTGAACGAGTTCGTGCTG
TGGCTGGAGGAGGCCGACAACATCGCCAGCATCCCCCTGGAGCCCGGCAAGGAGCAGCAGCTGAAGGAGAAGCTG
GAGCAGGTGAAGCTGCTGGTGGAGGAGCTGCCCCTGCGGCAGGGCATCCTGAAGCAGCTGAACGAGACCGGCGGC
CCCGTGCTGGTGAGCGCCCCCATCAGCCCCGAGGAGCAGGACAAGCTGGAGAACAAGCTGAAGCAGACCAACCTG
CAGTGGATCAAGGTGAGCCGGGCCCTGCCCGAGAAGCAGGGCGAGATCGAGGCCCAGATCAAGGACCTGGGCCAG
CTGGAGAAGAAGCTGGAGGACCTGGAGGAGCAGCTGAACCACCTGCTGCTGTGGCTGAGCCCCATCCGGAACCAG
CTGGAGATCTACAACCAGCCCAACCAGGAGGGCCCCTTCGACGTGAAGGAGACCGAGATCGCCGTGCAGGCCAAG
CAGCCCGACGTGGAGGAGATCCTGAGCAAGGGCCAGCACCTGTACAAGGAGAAGCCCGCCACCCAGCCCGTGAAG
CGGAAGCTGGAGGACCTGAGCAGCGAGTGGAAGGCCGTGAACCGGCTGCTGCAGGAGCTGCGGGCCAAGCAG
Dystrophin Repeat 23
Human Sequences without codon alterations:
(SEQ ID NO: 224)
AGTTCTGACCAGTGGAAGCGTCTGCACCTTTCTCTGCAGGAACTTCTGGTGTGGCTACAGCTGAAAGATGATGAA
TTAAGCCGGCAGGCACCTATTGGAGGCGACTTTCCAGCAGTTCAGAAGCAGAACGATGTACATAGGGCCTTCAAG
AGGGAATTGAAAACTAAAGAACCTGTAATCATGAGTACTCTTGAGACTGTACGAATATTTCTGACAGAGCAGCCT
TTGGAAGGACTAGAGAAACTCTACCAGGAGCCCAGAGAGCTGCCTCCTGAGGAGAGAGCCCAGAATGTCACTCGG
CTTCTACGAAAGCAGGCTGAGGAGGTCAATACTGAGTGGGAAAAATTGAACCTGCACTCCGCTGAC
Human Sequences with codon optimization:
(SEQ ID NO: 225)
AGCAGCGACCAGTGGAAGCGGCTGCACCTGAGCCTGCAGGAGCTGCTGGTGTGGCTGCAGCTGAAGGACGACGAG
CTGAGCCGGCAGGCCCCCATCGGCGGCGACTTCCCCGCCGTGCAGAAGCAGAACGACGTGCACCGGGCCTTCAAG
CGGGAGCTGAAGACCAAGGAGCCCGTGATCATGAGCACCCTGGAGACCGTGCGGATCTTCCTGACCGAGCAGCCC
CTGGAGGGCCTGGAGAAGCTGTACCAGGAGCCCCGGGAGCTGCCCCCCGAGGAGCGGGCCCAGAACGTGACCCGG
CTGCTGCGGAAGCAGGCCGAGGAGGTGAACACCGAGTGGGAGAAGCTGAACCTGCACAGCGCCGAC
Dystrophin Repeat 24
Human Sequences without codon alterations:
(SEQ ID NO: 226)
TGGCAGAGAAAAATAGATGAGACCCTTGAAAGACTCCGGGAACTTCAAGAGGCCACGGATGAGCTGGACCTCAAG
CTGCGCCAAGCTGAGGTGATCAAGGGATCCTGGCAGCCCGTGGGCGATCTCCTCATTGACTCTCTCCAAGATCAC
CTCGAGAAAGTCAAGGCACTTCGAGGAGAAATTGCGCCTCTGAAAGAGAACGTGAGCCACGTCAATGACCTTGCT
CGCCAGCTTACCACTTTGGGCATTCAGCTCTCACCGTATAACCTCAGCACTCTGGAAGACCTGAACACCAGATGG
AAGCTTCTGCAGGTGGCCGTCGAGGACCGAGTCAGGCAGCTGCATGAAGCCCACAGGGACTTT
Human Sequences with codon optimization:
(SEQ ID NO: 227)
TGGCAGAGAAAAATAGATGAGACCCTTGAAAGACTCCGGGAACTTCAAGAGGCCACGGATGAGCTGGACCTCAAG
CTGCGCCAAGCTGAGGTGATCAAGGGATCCTGGCAGCCCGTGGGCGATCTCCTCATTGACTCTCTCCAAGATCAC
CTCGAGAAAGTCAAGGCACTTCGAGGAGAAATTGCGCCTCTGAAAGAGAACGTGAGCCACGTCAATGACCTTGCT
CGCCAGCTTACCACTTTGGGCATTCAGCTCTCACCGTATAACCTCAGCACTCTGGAAGACCTGAACACCAGATGG
AAGCTTCTGCAGGTGGCCGTCGAGGACCGAGTCAGGCAGCTGCATGAAGCCCACAGGGACTTT
Dystrophin Repeat 24 (in constructs 14-20)
Human Sequences without codon alterations:
(SEQ ID NO: 228)
CAGAGAAAAATAGATGAGACCCTTGAAAGACTCCGGGAACTTCAAGAGGCCACGGATGAGCTGGACCTCAAGCTG
CGCCAAGCTGAGGTGATCAAGGGATCCTGGCAGCCCGTGGGCGATCTCCTCATTGACTCTCTCCAAGATCACCTC
GAGAAAGTCAAGGCACTTCGAGGAGAAATTGCGCCTCTGAAAGAGAACGTGAGCCACGTCAATGACCTTGCTCGC
CAGCTTACCACTTTGGGCATTCAGCTCTCACCGTATAACCTCAGCACTCTGGAAGACCTGAACACCAGATGGAAG
CTTCTGCAGGTGGCCGTCGAGGACCGAGTCAGGCAGCTGCATGAAGCCCACAGGGACTTT
Human Sequences with codon optimization:
(SEQ ID NO: 229)
CAGAGAAAAATAGATGAGACCCTTGAAAGACTCCGGGAACTTCAAGAGGCCACGGATGAGCTGGACCTCAAGCTG
CGCCAAGCTGAGGTGATCAAGGGATCCTGGCAGCCCGTGGGCGATCTCCTCATTGACTCTCTCCAAGATCACCTC
GAGAAAGTCAAGGCACTTCGAGGAGAAATTGCGCCTCTGAAAGAGAACGTGAGCCACGTCAATGACCTTGCTCGC
CAGCTTACCACTTTGGGCATTCAGCTCTCACCGTATAACCTCAGCACTCTGGAAGACCTGAACACCAGATGGAAG
CTTCTGCAGGTGGCCGTCGAGGACCGAGTCAGGCAGCTGCATGAAGCCCACAGGGACTTT
Dystrophin Hinge 4 + truncated C terminus
Human Sequences without codon alterations:
(SEQ ID NO: 230)
GGTCCAGCATCTCAGCACTTTCTTTCCACGTCTGTCCAGGGTCCCTGGGAGAGAGCCATCTCGCCAAACAAAGTG
CCCTACTATATCAACCACGAGACTCAAACAACTTGCTGGGACCATCCCAAAATGACAGAGCTCTACCAGTCTTTA
GCTGACCTGAATAATGTCAGATTCTCAGCTTATAGGACTGCCATGAAACTCCGAAGACTGCAGAAGGCCCTTTGC
TTGGATCTCTTGAGCCTGTCAGCTGCATGTGATGCCTTGGACCAGCACAACCTCAAGCAAAATGACCAGCCCATG
GATATCCTGCAGATTATTAATTGTTTGACCACTATTTATGACCGCCTGGAGCAAGAGCACAACAATTTGGTCAAC
GTCCCTCTCTGCGTGGATATGTGTCTGAACTGGCTGCTGAATGTTTATGATACGGGACGAACAGGGAGGATCCGT
GTCCTGTCTTTTAAAACTGGCATCATTTCCCTGTGTAAAGCACATTTGGAAGACAAGTACAGATACCTTTTCAAG
CAAGTGGCAAGTTCAACAGGATTTTGTGACCAGCGCAGGCTGGGCCTCCTTCTGCATGATTCTATCCAAATTCCA
AGACAGTTGGGTGAAGTTGCATCCTTTGGGGGCAGTAACATTGAGCCAAGTGTCCGGAGCTGCTTCCAATTTGCT
AATAATAAGCCAGAGATCGAAGCGGCCCTCTTCCTAGACTGGATGAGACTGGAACCCCAGTCCATGGTGTGGCTG
CCCGTCCTGCACAGAGTGGCTGCTGCAGAAACTGCCAAGCATCAGGCCAAATGTAACATCTGCAAAGAGTGTCCA
ATCATTGGATTCAGGTACAGGAGTCTAAAGCACTTTAATTATGACATCTGCCAAAGCTGCTTTTTTTCTGGTCGA
GTTGCAAAAGGCCATAAAATGCACTATCCCATGGTGGAATATTGCACTCCGACTACATCAGGAGAAGATGTTCGA
GACTTTGCCAAGGTACTAAAAAACAAATTTCGAACCAAAAGGTATTTTGCGAAGCATCCCCGAATGGGCTACCTG
CCAGTGCAGACTGTCTTAGAGGGGGACAACATGGAAACTCCC
Human Sequences with codon optimization:
(SEQ ID NO: 231)
GGTCCAGCATCTCAGCACTTTCTTTCCACGTCTGTCCAGGGTCCCTGGGAGAGAGCCATCTCGCCAAACAAAGTG
CCCTACTATATCAACCACGAGACTCAAACAACTTGCTGGGACCATCCCAAAATGACAGAGCTCTACCAGTCTTTA
GCTGACCTGAATAATGTCAGATTCTCAGCTTATAGGACTGCCATGAAACTCCGAAGACTGCAGAAGGCCCTTTGC
TTGGATCTCTTGAGCCTGTCAGCTGCATGTGATGCCTTGGACCAGCACAACCTCAAGCAAAATGACCAGCCCATG
GATATCCTGCAGATTATTAATTGTTTGACCACTATTTATGACCGCCTGGAGCAAGAGCACAACAATTTGGTCAAC
GTCCCTCTCTGCGTGGATATGTGTCTGAACTGGCTGCTGAATGTTTATGATACGGGACGAACAGGGAGGATCCGT
GTCCTGTCTTTTAAAACTGGCATCATTTCCCTGTGTAAAGCACATTTGGAAGACAAGTACAGATACCTTTTCAAG
CAAGTGGCAAGTTCAACAGGATTTTGTGACCAGCGCAGGCTGGGCCTCCTTCTGCATGATTCTATCCAAATTCCA
AGACAGTTGGGTGAAGTTGCATCCTTTGGGGGCAGTAACATTGAGCCAAGTGTCCGGAGCTGCTTCCAATTTGCT
AATAATAAGCCAGAGATCGAAGCGGCCCTCTTCCTAGACTGGATGAGACTGGAACCCCAGTCCATGGTGTGGCTG
CCCGTCCTGCACAGAGTGGCTGCTGCAGAAACTGCCAAGCATCAGGCCAAATGTAACATCTGCAAAGAGTGTCCA
ATCATTGGATTCAGGTACAGGAGTCTAAAGCACTTTAATTATGACATCTGCCAAAGCTGCTTTTTTTCTGGTCGA
GTTGCAAAAGGCCATAAAATGCACTATCCCATGGTGGAATATTGCACTCCGACTACATCAGGAGAAGATGTTCGA
GACTTTGCCAAGGTACTAAAAAACAAATTTCGAACCAAAAGGTATTTTGCGAAGCATCCCCGAATGGGCTACCTG
CCAGTGCAGACTGTCTTAGAGGGGGACAACATGGAAACTCCC
Syntrophin binding sites
Human Sequences with/without codon alterations:
(SEQ ID NO: 70)
GTTACTCTGATCAACTTCTGGCCAGTAGATTCTGCGCCTGCCTCGTCCCCTCAGCTTTCACACGATGATACTCAT
TCACGCATTGAACATTATGCTAGCAGGCTAGCAGAAATGGAAAACAGCAATGGATCTTATCTAAATGATAGCATC
TCTCCTAATGAGAGCATAGATGATGAACATTTGTTAATCCAGCATTACTGCCAAAGTTTGAACCAGGACTCCCCC
CTGAGCCAGCCTCGTAGT
1st coiled coil region + proline rich region
Human Sequences with/without codon alterations:
(SEQ ID NO: 72)
CCTGCCCAGATCTTGATTTCCTTAGAGAGTGAGGAAAGAGGGGAGCTAGAGAGAATCCTAGCAGATCTTGAGGAA
GAAAACAGGAATCTGCAAGCAGAATATGACCGTCTAAAGCAGCAGCACGAACATAAAGGCCTGTCCCCACTGCCG
TCCCCTCCTGAAATGATGCCCACCTCTCCCCAGAGTCCC
2nd coiled coil region to end of dystrophin
Human Sequences without codon alterations:
(SEQ ID NO: 232)
CGGGATGCTGAGCTCATTGCTGAGGCCAAGCTACTGCGTCAACACAAAGGCCGCCTGGAAGCCAGGATGCAAATC
CTGGAAGACCACAATAAACAGCTGGAGTCACAGTTACACAGGCTAAGGCAGCTGCTGGAGCAACCCCAGGCAGAG
GCCAAAGTGAATGGCACAACGGTGTCCTCTCCTTCTACCTCTCTACAGAGGTCCGACAGCAGTCAGCCTATGCTG
CTCCGAGTGGTTGGCAGTCAAACTTCGGACTCCATGGGTGAGGAAGATCTTCTCAGTCCTCCCCAGGACACAAGC
ACAGGGTTAGAGGAGGTGATGGAGCAACTCAACAACTCCTTCCCTAGITCAAGAGGAAGAAATACCCCTGGAAAG
CCAATGAGAGAGGACACAATG
Human Sequences with codon optimization:
(SEQ ID NO: 233)
CGGGATGCTGAGCTCATTGCTGAGGCCAAGCTACTGCGTCAACACAAAGGCCGCCTGGAAGCCAGGATGCAAATC
CTGGAAGACCACAATAAACAGCTGGAGTCACAGTTACACAGGCTAAGGCAGCTGCTGGAGCAACCCCAGGCAGAG
GCCAAAGTGAATGGCACAACGGTGTCCTCTCCTTCTACCTCTCTACAGAGGTCCGACAGCAGTCAGCCTATGCTG
CTCCGAGTGGTTGGCAGTCAAACTTCGGACTCCATGGGTGAGGAAGATCTTCTCAGTCCTCCCCAGGACACAAGC
ACAGGGTTAGAGGAGGTGATGGAGCAACTCAACAACTCCTTCCCTAGTTCAAGAGGAAGAAATACCCCTGGAAAG
CCAATGAGAGAGGACACAATG
Nterm
Human Sequences without codon alterations:
(SEQ ID NO: 234)
ATGCTTTGGTGGGAAGAAGTAGAGGACTGTTATGAAAGAGAAGATGTTCAAAAGAAAACATTCACAAAATGGGTA
AATGCACAATTTTCTAAGTTTGGGAAGCAGCATATTGAGAACCTCTTCAGTGACCTACAGGATGGGAGGCGCCTC
CTAGACCTCCTCGAAGGCCTGACAGGGCAAAAACTGCCAAAAGAAAAAGGATCCACAAGAGTTCATGCCCTGAAC
AATGTCAACAAGGCACTGCGGGTTTTGCAGAACAATAATGTTGATTTAGTGAATATTGGAAGTACTGACATCGTA
GATGGAAATCATAAACTGACTCTTGGTTTGATTTGGAATATAATCCTCCACTGGCAGGTCAAAAATGTAATGAAA
AATATCATGGCTGGATTGCAACAAACCAACAGTGAAAAGATTCTCCTGAGCTGGGTCCGACAATCAACTCGTAAT
TATCCACAGGTTAATGTAATCAACTTCACCACCAGCTGGTCTGATGGCCTGGCTTTGAATGCTCTCATCCATAGT
CATAGGCCAGACCTATTTGACTGGAATAGTGTGGTTTGCCAGCAGTCAGCCACACAACGACTGGAACATGCATTC
AACATCGCCAGATATCAATTAGGCATAGAGAAACTACTCGATCCTGAAGATGTTGATACCACCTATCCAGATAAG
AAGTCCATCTTAATGTACATCACATCACTCTTCCAAGTTTTGCCTCAACAAGTGAGCATTGAAGCCATCCAGGAA
GTGGAAATGTTGCCAAGGCCACCTAAAGTGACTAAAGAAGAACATTTTCAGTTACATCATCAAATGCACTATTCT
CAACAGATCACGGTCAGTCTAGCACAGGGATATGAGAGAACTTCTTCCCCTAAGCCTCGATTCAAGAGCTATGCC
TACACACAGGCTGCTTATGTCACCACCTCTGACCCTACACGGAGCCCATTTCCTTCACAGCATTTGGAAGCTCCT
Human Sequences with codon optimization:
(SEQ ID NO: 235)
ATGCTGTGGTGGGAGGAGGTGGAGGACTGCTACGAGCGGGAGGACGTGCAGAAGAAGACCTTCACCAAGTGGGTG
AACGCCCAGTTCAGCAAGTTCGGCAAGCAGCACATCGAGAACCTGTTCAGCGACCTGCAGGACGGCCGGCGGCTG
CTGGACCTGCTGGAGGGCCTGACCGGCCAGAAGCTGCCCAAGGAGAAGGGCAGCACCCGGGTGCACGCCCTGAAC
AACGTGAACAAGGCCCTGCGGGTGCTGCAGAACAACAACGTGGACCTGGTGAACATCGGCAGCACCGACATCGTG
GACGGCAACCACAAGCTGACCCTGGGCCTGATCTGGAACATCATCCTGCACTGGCAGGTGAAGAACGTGATGAAG
AACATCATGGCCGGCCTGCAGCAGACCAACAGCGAGAAGATCCTGCTGAGCTGGGTGCGGCAGAGCACCCGGAAC
TACCCCCAGGTGAACGTGATCAACTTCACCACCAGCTGGAGCGACGGCCTGGCCCTGAACGCCCTGATCCACAGC
CACCGGCCCGACCTGTTCGACTGGAACAGCGTGGTGTGCCAGCAGAGCGCCACCCAGCGGCTGGAGCACGCCTTC
AACATCGCCCGGTACCAGCTGGGCATCGAGAAGCTGCTGGACCCCGAGGACGTGGACACCACCTACCCCGACAAG
AAGAGCATCCTGATGTACATCACCAGCCTGTTCCAGGTGCTGCCCCAGCAGGTGAGCATCGAGGCCATCCAGGAG
GTGGAGATGCTGCCCCGGCCCCCCAAGGTGACCAAGGAGGAGCACTTCCAGCTGCACCACCAGATGCACTACAGC
CAGCAGATCACCGTGAGCCTGGCCCAGGGCTACGAGCGGACCAGCAGCCCCAAGCCCCGGTTCAAGAGCTACGCC
TACACCCAGGCCGCCTACGTGACCACCAGCGACCCCACCCGGAGCCCCTTCCCCAGCCAGCACCTGGAGGCCCCC
R1
Human Sequences without codon alterations:
(SEQ ID NO: 236)
GAAGACAAGTCATTTGGCAGTTCATTGATGGAGAGTGAAGTAAACCTGGACCGTTATCAAACAGCTTTAGAAGAA
GTATTATCGTGGCTTCTTTCTGCTGAGGACACATTGCAAGCACAAGGAGAGATTTCTAATGATGTGGAAGTGGTG
AAAGACCAGTTTCATACTCATGAGGGGTACATGATGGATTTGACAGCCCATCAGGGCCGGGTTGGTAATATTCTA
CAATTGGGAAGTAAGCTGATTGGAACAGGAAAATTATCAGAAGATGAAGAAACTGAAGTACAAGAGCAGATGAAT
CTCCTAAATTCAAGATGGGAATGCCTCAGGGTAGCTAGCATGGAAAAACAAAGCAATTTACATAGAGTTTTAATG
GAT
Human Sequences with codon optimization:
(SEQ ID NO: 237)
GAGGACAAGAGCTTCGGCAGCAGCCTGATGGAGAGCGAGGTGAACCTGGACCGGTACCAGACCGCCCTGGAGGAG
GTGCTGAGCTGGCTGCTGAGCGCCGAGGACACCCTGCAGGCCCAGGGCGAGATCAGCAACGACGTGGAGGTGGTG
AAGGACCAGTTCCACACCCACGAGGGCTACATGATGGACCTGACCGCCCACCAGGGCCGGGTGGGCAACATCCTG
CAGCTGGGCAGCAAGCTGATCGGCACCGGCAAGCTGAGCGAGGACGAGGAGACCGAGGTGCAGGAGCAGATGAAC
CTGCTGAACAGCCGGTGGGAGTGCCTGCGGGTGGCCAGCATGGAGAAGCAGAGCAACCTGCACCGGGTGCTGATG
GAC
R2
Human Sequences without codon alterations:
(SEQ ID NO: 238)
CTCCAGAATCAGAAACTGAAAGAGTTGAATGACTGGCTAACAAAAACAGAAGAAAGAACAAGGAAAATGGAGGAA
GAGCCTCTTGGACCTGATCTTGAAGACCTAAAACGCCAAGTACAACAACATAAGGTGCTTCAAGAAGATCTAGAA
CAAGAACAAGTCAGGGTCAATTCTCTCACTCACATGGTGGTGGTAGTTGATGAATCTAGTGGAGATCACGCAACT
GCTGCTTTGGAAGAACAACTTAAGGTATTGGGAGATCGATGGGCAAACATCTGTAGATGGACAGAAGACCGCTGG
GTTCTTTTACAAGAC
Human Sequences with codon optimization:
(SEQ ID NO: 239)
CTGCAGAACCAGAAGCTGAAGGAGCTGAACGACTGGCTGACCAAGACCGAGGAGCGGACCCGGAAGATGGAGGAG
GAGCCCCTGGGCCCCGACCTGGAGGACCTGAAGCGGCAGGTGCAGCAGCACAAGGTGCTGCAGGAGGACCTGGAG
CAGGAGCAGGTGCGGGTGAACAGCCTGACCCACATGGTGGTGGTGGTGGACGAGAGCAGCGGCGACCACGCCACC
GCCGCCCTGGAGGAGCAGCTGAAGGTGCTGGGCGACCGGTGGGCCAACATCTGCCGGTGGACCGAGGACCGGTGG
GTGCTGCTGCAGGAC
Dystrophin R17 (in constructs 21-30)
Human Sequences without codon alterations:
(SEQ ID NO: 240)
CGATTTGACAGATCTGTTGAGAAATGGCGGCGTTTTCATTATGATATAAAGATATTTAATCAGTGGCTAACAGAA
GCTGAACAGTTTCTCAGAAAGACACAAATTCCTGAGAATTGGGAACATGCTAAATACAAATGGTATCTTAAGGAA
CTCCAGGATGGCATTGGGCAGCGGCAAACTGTTGTCAGAACATTGAATGCAACTGGGGAAGAAATAATTCAGCAA
TCCTCAAAAACAGATGCCAGTATTCTACAGGAAAAATTGGGAAGCCTGAATCTGCGGTGGCAGGAGGTCTGCAAA
CAGCTGTCAGACAGAAAAAAGAGGCTAGAAGAACAAAAG
Human Sequences with codon optimization:
(SEQ ID NO: 241)
CGGTTCGACCGGAGCGTGGAGAAGTGGCGGCGGTTCCACTACGACATCAAGATCTTCAACCAGTGGCTGACCGAG
GCCGAGCAGTTCCTGCGGAAGACCCAGATCCCCGAGAACTGGGAGCACGCCAAGTACAAGTGGTACCTGAAGGAG
CTGCAGGACGGCATCGGCCAGCGGCAGACCGTGGTGCGGACCCTGAACGCCACCGGCGAGGAGATCATCCAGCAG
AGCAGCAAGACCGACGCCAGCATCCTGCAGGAGAAGCTGGGCAGCCTGAACCTGCGGTGGCAGGAGGTGTGCAAG
CAGCTGAGCGACCGGAAGAAGCGGCTGGAGGAGCAGAAG
Hinge 3
Human Sequences without codon alterations:
(SEQ ID NO: 242)
CAGCCTGACCTAGCTCCTGGACTGACCACTATTGGAGCCTCTCCTACTCAGACTGTTACTCTGGTGACACAACCT
GTGGTTACTAAGGAAACTGCCATCTCCAAACTAGAAATGCCATCTTCCTTGATGTTGGAGGTACCT
Human Sequences with codon optimization:
(SEQ ID NO: 243)
CAGCCCGACCTGGCCCCCGGCCTGACCACCATCGGCGCCAGCCCCACCCAGACCGTGACCCTGGTGACCCAGCCC
GTGGTGACCAAGGAGACCGCCATCAGCAAGCTGGAGATGCCCAGCAGCCTGATGCTGGAGGTGCCC
Repeat 21
Human Sequences without codon alterations:
(SEQ ID NO: 244)
AAGGATTCAACACAATGGCTGGAAGCTAAGGAAGAAGCTGAGCAGGTCTTAGGACAGGCCAGAGCCAAGCTTGAG
TCATGGAAGGAGGGTCCCTATACAGTAGATGCAATCCAAAAGAAAATCACAGAAACCAAGCAGTTGGCCAAAGAC
CTCCGCCAGTGGCAGACAAATGTAGATGTGGCAAATGACTTGGCCCTGAAACTTCTCCGGGATTATTCTGCAGAT
GATACCAGAAAAGTCCACATGATAACAGAGAATATCAATGCCTCTTGGAGAAGCATTCATAAAAGGGTGAGTGAG
CGAGAGGCTGCTTTG
Human Sequences with codon optimization:
(SEQ ID NO: 245)
AAGGACAGCACCCAGTGGCTGGAGGCCAAGGAGGAGGCCGAGCAGGTGCTGGGCCAGGCCCGGGCCAAGCTGGAG
AGCTGGAAGGAGGGCCCCTACACCGTGGACGCCATCCAGAAGAAGATCACCGAGACCAAGCAGCTGGCCAAGGAC
CTGCGGCAGTGGCAGACCAACGTGGACGTGGCCAACGACCTGGCCCTGAAGCTGCTGCGGGACTACAGCGCCGAC
GACACCCGGAAGGTGCACATGATCACCGAGAACATCAACGCCAGCTGGCGGAGCATCCACAAGCGGGTGAGCGAG
CGGGAGGCCGCCCTG
Repeat 22 + linker
Human Sequences without codon alterations:
(SEQ ID NO: 246)
GAAGAAACTCATAGATTACTGCAACAGTTCCCCCTGGACCTGGAAAAGTTTCTTGCCTGGCTTACAGAAGCTGAA
ACAACTGCCAATGTCCTACAGGATGCTACCCGTAAGGAAAGGCTCCTAGAAGACTCCAAGGGAGTAAAAGAGCTG
ATGAAACAATGGCAAGACCTCCAAGGTGAAATTGAAGCTCACACAGATGTTTATCACAACCTGGATGAAAACAGC
CAAAAAATCCTGAGATCCCTGGAAGGTTCCGATGATGCAGTCCTGTTACAAAGACGTTTGGATAACATGAACTTC
AAGTGGAGTGAACTTCGGAAAAAGTCTCTCAACATTAGGTCCCATTTGGAAGCCAGTTCTGACCAGTGGAAGCGT
CTG
Human Sequences with codon optimization:
(SEQ ID NO: 247)
GAGGAGACCCACCGGCTGCTGCAGCAGTTCCCCCTGGACCTGGAGAAGTTCCTGGCCTGGCTGACCGAGGCCGAG
ACCACCGCCAACGTGCTGCAGGACGCCACCCGGAAGGAGCGGCTGCTGGAGGACAGCAAGGGCGTGAAGGAGCTG
ATGAAGCAGTGGCAGGACCTGCAGGGCGAGATCGAGGCCCACACCGACGTGTACCACAACCTGGACGAGAACAGC
CAGAAGATCCTGCGGAGCCTGGAGGGCAGCGACGACGCCGTGCTGCTGCAGCGGCGGCTGGACAACATGAACTTC
AAGTGGAGCGAGCTGCGGAAGAAGAGCCTGAACATCCGGAGCCACCTGGAGGCCAGCAGCGACCAGTGGAAGCGG
CTG

### EQUIVALENTS AND SCOPE

[0228] While several inventive embodiments have been described and illustrated herein, those of ordinary skill in the art will readily envision a variety of other means and/or structures for performing the function and/or obtaining the results and/or one or more of the advantages described herein, and each of such variations and/or modifications is deemed to be within the scope of the inventive embodiments described herein. More generally, those skilled in the art will readily appreciate that all parameters, dimensions, materials, and configurations described herein are meant to be exemplary and that the actual parameters, dimensions, materials, and/or configurations will depend upon the specific application or applications for which the inventive teachings is/are used. Those skilled in the art will recognize, or be able to ascertain using no more than routine experimentation, many equivalents to the specific inventive embodiments described herein. It is, therefore, to be understood that the foregoing embodiments are presented by way of example only and that, within the scope of the appended claims and equivalents thereto, inventive embodiments may be practiced otherwise than as specifically described and claimed. Inventive embodiments of the present disclosure are directed to each individual feature, system, article, material, kit, and/or method described herein. In addition, any combination of two or more such features, systems, articles, materials, kits, and/or methods, if such features, systems, articles, materials, kits, and/or methods are not mutually inconsistent, is included within the inventive scope of the present disclosure.

[0229] All definitions, as defined and used herein, should be understood to control over dictionary definitions, definitions in documents incorporated by reference, and/or ordinary meanings of the defined terms.

[0230] All references, patents, and patent applications disclosed herein are incorporated by reference with respect to the subject matter for which each is cited, which in some cases may encompass the entirety of the document.

[0231] The indefinite articles “a” and “an,” as used herein in the specification and in the claims, unless clearly indicated to the contrary, should be understood to mean “at least one.”

[0232] The phrase “and/or,” as used herein in the specification and in the claims, should be understood to mean “either or both” of the elements so conjoined, i.e., elements that are conjunctively present in some cases and disjunctively present in other cases. Multiple elements listed with “and/or” should be construed in the same fashion, i.e., “one or more” of the elements so conjoined. Other elements may optionally be present other than the elements specifically identified by the “and/or” clause, whether related or unrelated to those elements specifically identified. Thus, as a non-limiting example, a reference to “A and/or B”, when used in conjunction with open-ended language such as “comprising” can refer, in one embodiment, to A only (optionally including elements other than B); in another embodiment, to B only (optionally including elements other than A); in yet another embodiment, to both A and B (optionally including other elements); etc.

[0233] As used herein in the specification and in the claims, “or” should be understood to have the same meaning as “and/or” as defined above. For example, when separating items in a list, “or” or “and/or” shall be interpreted as being inclusive, i.e., the inclusion of at least one, but also including more than one, of a number or list of elements, and, optionally, additional unlisted items. Only terms clearly indicated to the contrary, such as “only one of” or “exactly one of,” or, when used in the claims, “consisting of,” will refer to the inclusion of exactly one element of a number or list of elements. In general, the term “or” as used herein shall only be interpreted as indicating exclusive alternatives (i.e. “one or the other but not both”) when preceded by terms of exclusivity, such as “either,” “one of,” “only one of,” or “exactly one of.” “Consisting essentially of,” when used in the claims, shall have its ordinary meaning as used in the field of patent law.

[0234] As used herein in the specification and in the claims, the phrase “at least one,” in reference to a list of one or more elements, should be understood to mean at least one element selected from any one or more of the elements in the list of elements, but not necessarily including at least one of each and every element specifically listed within the list of elements and not excluding any combinations of elements in the list of elements. This definition also allows that elements may optionally be present other than the elements specifically identified within the list of elements to which the phrase “at least one” refers, whether related or unrelated to those elements specifically identified. Thus, as a non-limiting example, “at least one of A and B” (or, equivalently, “at least one of A or B.” or, equivalently “at least one of A and/or B”) can refer, in one embodiment, to at least one, optionally including more than one, A, with no B present (and optionally including elements other than B); in another embodiment, to at least one, optionally including more than one, B, with no A present (and optionally including elements other than A); in yet another embodiment, to at least one, optionally including more than one, A, and at least one, optionally including more than one, B (and optionally including other elements); etc.

[0235] It should also be understood that, unless clearly indicated to the contrary, in any methods claimed herein that include more than one step or act, the order of the steps or acts of the method is not necessarily limited to the order in which the steps or acts of the method are recited.

[0236] In the claims, as well as in the specification above, all transitional phrases such as “comprising.” “including.” “carrying.” “having.” “containing.” “involving.” “holding,” “composed of,” and the like are to be understood to be open-ended, i.e., to mean including but not limited to. Only the transitional phrases “consisting of” and “consisting essentially of” shall be closed or semi-closed transitional phrases, respectively, as set forth in the United States Patent Office Manual of Patent Examining Procedures, Section 2111.03. It should be appreciated that embodiments described in this document using an open-ended transitional phrase (e.g., “comprising”) are also contemplated, in alternative embodiments, as “consisting of” and “consisting essentially of” the feature described by the open-ended transitional phrase. For example, if the disclosure describes “a composition comprising A and B,” the disclosure also contemplates the alternative embodiments “a composition consisting of A and B” and “a composition consisting essentially of A and B.”

The application's sequence listing, which the Patent Office published only in electronic form, follows.

SEQUENCE LISTING (249 sequences)

SEQ ID NO: 1 - protein, 1263 aa, synthetic construct
MLWWEEVEDCYEREDVQKKTFTKWVNAQFSKFGKQHIENLFSDLQDGRRLLDLLEGLTGQKLPKEKGSTRVHALNNVNKALRVLQNNNVDLVNIGSTDIVDGNHKLTLGLIWNIILHWQVKNVMKNIMAGLQQTNSEKILLSWVRQSTRNYPQVNVINFTTSWSDGLALNALIHSHRPDLFDWNSVVCQQSATQRLEHAFNIARYQLGIEKLLDPEDVDTTYPDKKSILMYITSLFQVLPQQVSIEAIQEVEMLPRPPKVTKEEHFQLHHQMHYSQQITVSLAQGYERTSSPKPRFKSYAYTQAAYVTTSDPTRSPFPSQHLEAPEDKSFGSSLMESEVNLDRYQTALEEVLSWLLSAEDTLQAQGEISNDVEVVKDQFHTHEGYMMDLTAHQGRVGNILQLGSKLIGTGKLSEDEETEVQEQMNLLNSRWECLRVASMEKQSNLHRVLMDRFDRSVEKWRRFHYDIKIFNQWLTEAEQFLRKTQIPENWEHAKYKWYLKELQDGIGQRQTVVRTLNATGEEIIQQSSKTDASILQEKLGSLNLRWQEVCKQLSDRKKRLEEQKNILSEFQRDLNEFVLWLEEADNIASIPLEPGKEQQLKEKLEQVKLLVEELPLRQGILKQLNETGGPVLVSAPISPEEQDKLENKLKQTNLQWIKVSRALPEKQGEIEAQIKDLGQLEKKLEDLEEQLNHLLLWLSPIRNQLEIYNQPNQEGPFDVKETEIAVQAKQPDVEEILSKGQHLYKEKPATQPVKRKLEDLSSEWKAVNRLLQELRAKQWQRKIDETLERLQELQEATDELDLKLRQAEVIKGSWQPVGDLLIDSLQDHLEKVKALRGEIAPLKENVSHVNDLARQLTTLGIQLSPYNLSTLEDLNTRWKLLQVAVEDRVRQLHEAHRDFGPASQHFLSTSVQGPWERAISPNKVPYYINHETQTTCWDHPKMTELYQSLADLNNVRFSAYRTAMKLRRLQKALCLDLLSLSAACDALDQHNLKQNDQPMDILQIINCLTTIYDRLEQEHNNLVNVPLCVDMCLNWLLNVYDTGRTGRIRVLSFKTGIISLCKAHLEDKYRYLFKQVASSTGFCDQRRLGLLLHDSIQIPRQLGEVASFGGSNIEPSVRSCFQFANNKPEIEAALFLDWMRLEPQSMVWLPVLHRVAAAETAKHQAKCNICKECPIIGFRYRSLKHFNYDICQSCFFSGRVAKGHKMHYPMVEYCTPTTSGEDVRDFAKVLKNKFRTKRYFAKHPRMGYLPVQTVLEGDNMETP

SEQ ID NO: 2 - protein, 1286 aa, synthetic construct
MLWWEEVEDCYEREDVQKKTFTKWVNAQFSKFGKQHIENLFSDLQDGRRLLDLLEGLTGQKLPKEKGSTRVHALNNVNKALRVLQNNNVDLVNIGSTDIVDGNHKLTLGLIWNIILHWQVKNVMKNIMAGLQQTNSEKILLSWVRQSTRNYPQVNVINFTTSWSDGLALNALIHSHRPDLFDWNSVVCQQSATQRLEHAFNIARYQLGIEKLLDPEDVDTTYPDKKSILMYITSLFQVLPQQVSIEAIQEVEMLPRPPKVTKEEHFQLHHQMHYSQQITVSLAQGYERTSSPKPRFKSYAYTQAAYVTTSDPTRSPFPSQHLEAPEDKSFGSSLMESEVNLDRYQTALEEVLSWLLSAEDTLQAQGEISNDVEVVKDQFHTHEGYMMDLTAHQGRVGNILQLGSKLIGTGKLSEDEETEVQEQMNLLNSRWECLRVASMEKQSNLHRVLMDRFDRSVEKWRRFHYDIKIFNQWLTEAEQFLRKTQIPENWEHAKYKWYLKELQDGIGQRQTVVRTLNATGEEIIQQSSKTDASILQEKLGSLNLRWQEVCKQLSDRKKRLEEQKNILSEFQRDLNEFVLWLEEADNIASIPLEPGKEQQLKEKLEQVKLLVEELPLRQGILKQLNETGGPVLVSAPISPEEQDKLENKLKQTNLQWIKVSRALPEKQGEIEAQIKDLGQLEKKLEDLEEQLNHLLLWLSPIRNQLEIYNQPNQEGPFDVKETEIAVQAKQPDVEEILSKGQHLYKEKPATQPVKRKLEDLSSEWKAVNRLLQELRAKQGPASQHFLSTSVQGPWERAISPNKVPYYINHETQTTCWDHPKMTELYQSLADLNNVRFSAYRTAMKLRRLQKALCLDLLSLSAACDALDQHNLKQNDQPMDILQIINCLTTIYDRLEQEHNNLVNVPLCVDMCLNWLLNVYDTGRTGRIRVLSFKTGIISLCKAHLEDKYRYLFKQVASSTGFCDQRRLGLLLHDSIQIPRQLGEVASFGGSNIEPSVRSCFQFANNKPEIEAALFLDWMRLEPQSMVWLPVLHRVAAAETAKHQAKCNICKECPIIGFRYRSLKHFNYDICQSCFFSGRVAKGHKMHYPMVEYCTPTTSGEDVRDFAKVLKNKFRTKRYFAKHPRMGYLPVQTVLEGDNMETPVTLINFWPVDSAPASSPQLSHDDTHSRIEHYASRLAEMENSNGSYLNDSISPNESIDDEHLLIQHYCQSLNQDSPLSQPRSPAQILISLESEERGELERILADLEEENRNLQAEYDRLKQQHEHKGLSPLPSPPEMMPTSPQSP

SEQ ID NO: 3 - protein, 1223 aa, synthetic construct
MLWWEEVEDCYEREDVQKKTFTKWVNAQFSKFGKQHIENLFSDLQDGRRLLDLLEGLTGQKLPKEKGSTRVHALNNVNKALRVLQNNNVDLVNIGSTDIVDGNHKLTLGLIWNIILHWQVKNVMKNIMAGLQQTNSEKILLSWVRQSTRNYPQVNVINFTTSWSDGLALNALIHSHRPDLFDWNSVVCQQSATQRLEHAFNIARYQLGIEKLLDPEDVDTTYPDKKSILMYITSLFQVLPQQVSIEAIQEVEMLPRPPKVTKEEHFQLHHQMHYSQQITVSLAQGYERTSSPKPRFKSYAYTQAAYVTTSDPTRSPFPSQHLEAPEDKSFGSSLMESEVNLDRYQTALEEVLSWLLSAEDTLQAQGEISNDVEVVKDQFHTHEGYMMDLTAHQGRVGNILQLGSKLIGTGKLSEDEETEVQEQMNLLNSRWECLRVASMEKQSNLHRVLMDRFDRSVEKWRRFHYDIKIFNQWLTEAEQFLRKTQIPENWEHAKYKWYLKELQDGIGQRQTVVRTLNATGEEIIQQSSKTDASILQEKLGSLNLRWQEVCKQLSDRKKRLEEQKNILSEFQRDLNEFVLWLEEADNIASIPLEPGKEQQLKEKLEQVKLLVEELPLRQGILKQLNETGGPVLVSAPISPEEQDKLENKLKQTNLQWIKVSRALPEKQGEIEAQIKDLGQLEKKLEDLEEQLNHLLLWLSPIRNQLEIYNQPNQEGPFDVKETEIAVQAKQPDVEEILSKGQHLYKEKPATQPVKRKLEDLSSEWKAVNRLLQELRAKQGPASQHFLSTSVQGPWERAISPNKVPYYINHETQTTCWDHPKMTELYQSLADLNNVRFSAYRTAMKLRRLQKALCLDLLSLSAACDALDQHNLKQNDQPMDILQIINCLTTIYDRLEQEHNNLVNVPLCVDMCLNWLLNVYDTGRTGRIRVLSFKTGIISLCKAHLEDKYRYLFKQVASSTGFCDQRRLGLLLHDSIQIPRQLGEVASFGGSNIEPSVRSCFQFANNKPEIEAALFLDWMRLEPQSMVWLPVLHRVAAAETAKHQAKCNICKECPIIGFRYRSLKHFNYDICQSCFFSGRVAKGHKMHYPMVEYCTPTTSGEDVRDFAKVLKNKFRTKRYFAKHPRMGYLPVQTVLEGDNMETPVTLINFWPVDSAPASSPQLSHDDTHSRIEHYASRLAEMENSNGSYLNDSISPNESIDDEHLLIQHYCQSLNQDSPLSQPRS

SEQ ID NO: 4 - protein, 1407 aa, synthetic construct
MLWWEEVEDCYEREDVQKKTFTKWVNAQFSKFGKQHIENLFSDLQDGRRLLDLLEGLTGQKLPKEKGSTRVHALNNVNKALRVLQNNNVDLVNIGSTDIVDGNHKLTLGLIWNIILHWQVKNVMKNIMAGLQQTNSEKILLSWVRQSTRNYPQVNVINFTTSWSDGLALNALIHSHRPDLFDWNSVVCQQSATQRLEHAFNIARYQLGIEKLLDPEDVDTTYPDKKSILMYITSLFQVLPQQVSIEAIQEVEMLPRPPKVTKEEHFQLHHQMHYSQQITVSLAQGYERTSSPKPRFKSYAYTQAAYVTTSDPTRSPFPSQHLEAPEDKSFGSSLMESEVNLDRYQTALEEVLSWLLSAEDTLQAQGEISNDVEVVKDQFHTHEGYMMDLTAHQGRVGNILQLGSKLIGTGKLSEDEETEVQEQMNLLNSRWECLRVASMEKQSNLHRVLMDRFDRSVEKWRRFHYDIKIFNQWLTEAEQFLRKTQIPENWEHAKYKWYLKELQDGIGQRQTVVRTLNATGEEIIQQSSKTDASILQEKLGSLNLRWQEVCKQLSDRKKRLEEQKNILSEFQRDLNEFVLWLEEADNIASIPLEPGKEQQLKEKLEQVKLLVEELPLRQGILKQLNETGGPVLVSAPISPEEQDKLENKLKQTNLQWIKVSRALPEKQGEIEAQIKDLGQLEKKLEDLEEQLNHLLLWLSPIRNQLEIYNQPNQEGPFDVKETEIAVQAKQPDVEEILSKGQHLYKEKPATQPVKRKLEDLSSEWKAVNRLLQELRAKQWQRKIDETLERLQELQEATDELDLKLRQAEVIKGSWQPVGDLLIDSLQDHLEKVKALRGEIAPLKENVSHVNDLARQLTTLGIQLSPYNLSTLEDLNTRWKLLQVAVEDRVRQLHEAHRDFGPASQHFLSTSVQGPWERAISPNKVPYYINHETQTTCWDHPKMTELYQSLADLNNVRFSAYRTAMKLRRLQKALCLDLLSLSAACDALDQHNLKQNDQPMDILQIINCLTTIYDRLEQEHNNLVNVPLCVDMCLNWLLNVYDTGRTGRIRVLSFKTGIISLCKAHLEDKYRYLFKQVASSTGFCDQRRLGLLLHDSIQIPRQLGEVASFGGSNIEPSVRSCFQFANNKPEIEAALFLDWMRLEPQSMVWLPVLHRVAAAETAKHQAKCNICKECPIIGFRYRSLKHFNYDICQSCFFSGRVAKGHKMHYPMVEYCTPTTSGEDVRDFAKVLKNKFRTKRYFAKHPRMGYLPVQTVLEGDNMETPVTLINFWPVDSAPASSPQLSHDDTHSRIEHYASRLAEMENSNGSYLNDSISPNESIDDEHLLIQHYCQSLNQDSPLSQPRSPAQILISLESEERGELERILADLEEENRNLQAEYDRLKQQHEHKGLSPLPSPPEMMPTSPQSP

SEQ ID NO: 5 - protein, 1418 aa, synthetic construct
MLWWEEVEDCYEREDVQKKTFTKWVNAQFSKFGKQHIENLFSDLQDGRRLLDLLEGLTGQKLPKEKGSTRVHALNNVNKALRVLQNNNVDLVNIGSTDIVDGNHKLTLGLIWNIILHWQVKNVMKNIMAGLQQTNSEKILLSWVRQSTRNYPQVNVINFTTSWSDGLALNALIHSHRPDLFDWNSVVCQQSATQRLEHAFNIARYQLGIEKLLDPEDVDTTYPDKKSILMYITSLFQVLPQQVSIEAIQEVEMLPRPPKVTKEEHFQLHHQMHYSQQITVSLAQGYERTSSPKPRFKSYAYTQAAYVTTSDPTRSPFPSQHLEAPEDKSFGSSLMESEVNLDRYQTALEEVLSWLLSAEDTLQAQGEISNDVEVVKDQFHTHEGYMMDLTAHQGRVGNILQLGSKLIGTGKLSEDEETEVQEQMNLLNSRWECLRVASMEKQSNLHRVLMDRFDRSVEKWRRFHYDIKIFNQWLTEAEQFLRKTQIPENWEHAKYKWYLKELQDGIGQRQTVVRTLNATGEEIIQQSSKTDASILQEKLGSLNLRWQEVCKQLSDRKKRLEEQKNILSEFQRDLNEFVLWLEEADNIASIPLEPGKEQQLKEKLEQVKLLVEELPLRQGILKQLNETGGPVLVSAPISPEEQDKLENKLKQTNLQWIKVSRALPEKQGEIEAQIKDLGQLEKKLEDLEEQLNHLLLWLSPIRNQLEIYNQPNQEGPFDVKETEIAVQAKQPDVEEILSKGQHLYKEKPATQPVKRKLEDLSSEWKAVNRLLQELRAKQGPASQHFLSTSVQGPWERAISPNKVPYYINHETQTTCWDHPKMTELYQSLADLNNVRFSAYRTAMKLRRLQKALCLDLLSLSAACDALDQHNLKQNDQPMDILQIINCLTTIYDRLEQEHNNLVNVPLCVDMCLNWLLNVYDTGRTGRIRVLSFKTGIISLCKAHLEDKYRYLFKQVASSTGFCDQRRLGLLLHDSIQIPRQLGEVASFGGSNIEPSVRSCFQFANNKPEIEAALFLDWMRLEPQSMVWLPVLHRVAAAETAKHQAKCNICKECPIIGFRYRSLKHFNYDICQSCFFSGRVAKGHKMHYPMVEYCTPTTSGEDVRDFAKVLKNKFRTKRYFAKHPRMGYLPVQTVLEGDNMETPVTLINFWPVDSAPASSPQLSHDDTHSRIEHYASRLAEMENSNGSYLNDSISPNESIDDEHLLIQHYCQSLNQDSPLSQPRSPAQILISLESEERGELERILADLEEENRNLQAEYDRLKQQHEHKGLSPLPSPPEMMPTSPQSPRDAELIAEAKLLRQHKGRLEARMQILEDHNKQLESQLHRLRQLLEQPQAEAKVNGTTVSSPSTSLQRSDSSQPMLLRVVGSQTSDSMGEEDLLSPPQDTSTGLEEVMEQLNNSFPSSRGRNTPGKPMREDTM

SEQ ID NO: 6 - protein, 1539 aa, synthetic construct
MLWWEEVEDCYEREDVQKKTFTKWVNAQFSKFGKQHIENLFSDLQDGRRLLDLLEGLTGQKLPKEKGSTRVHALNNVNKALRVLQNNNVDLVNIGSTDIVDGNHKLTLGLIWNIILHWQVKNVMKNIMAGLQQTNSEKILLSWVRQSTRNYPQVNVINFTTSWSDGLALNALIHSHRPDLFDWNSVVCQQSATQRLEHAFNIARYQLGIEKLLDPEDVDTTYPDKKSILMYITSLFQVLPQQVSIEAIQEVEMLPRPPKVTKEEHFQLHHQMHYSQQITVSLAQGYERTSSPKPRFKSYAYTQAAYVTTSDPTRSPFPSQHLEAPEDKSFGSSLMESEVNLDRYQTALEEVLSWLLSAEDTLQAQGEISNDVEVVKDQFHTHEGYMMDLTAHQGRVGNILQLGSKLIGTGKLSEDEETEVQEQMNLLNSRWECLRVASMEKQSNLHRVLMDRFDRSVEKWRRFHYDIKIFNQWLTEAEQFLRKTQIPENWEHAKYKWYLKELQDGIGQRQTVVRTLNATGEEIIQQSSKTDASILQEKLGSLNLRWQEVCKQLSDRKKRLEEQKNILSEFQRDLNEFVLWLEEADNIASIPLEPGKEQQLKEKLEQVKLLVEELPLRQGILKQLNETGGPVLVSAPISPEEQDKLENKLKQTNLQWIKVSRALPEKQGEIEAQIKDLGQLEKKLEDLEEQLNHLLLWLSPIRNQLEIYNQPNQEGPFDVKETEIAVQAKQPDVEEILSKGQHLYKEKPATQPVKRKLEDLSSEWKAVNRLLQELRAKQWQRKIDETLERLQELQEATDELDLKLRQAEVIKGSWQPVGDLLIDSLQDHLEKVKALRGEIAPLKENVSHVNDLARQLTTLGIQLSPYNLSTLEDLNTRWKLLQVAVEDRVRQLHEAHRDFGPASQHFLSTSVQGPWERAISPNKVPYYINHETQTTCWDHPKMTELYQSLADLNNVRFSAYRTAMKLRRLQKALCLDLLSLSAACDALDQHNLKQNDQPMDILQIINCLTTIYDRLEQEHNNLVNVPLCVDMCLNWLLNVYDTGRTGRIRVLSFKTGIISLCKAHLEDKYRYLFKQVASSTGFCDQRRLGLLLHDSIQIPRQLGEVASFGGSNIEPSVRSCFQFANNKPEIEAALFLDWMRLEPQSMVWLPVLHRVAAAETAKHQAKCNICKECPIIGFRYRSLKHFNYDICQSCFFSGRVAKGHKMHYPMVEYCTPTTSGEDVRDFAKVLKNKFRTKRYFAKHPRMGYLPVQTVLEGDNMETPVTLINFWPVDSAPASSPQLSHDDTHSRIEHYASRLAEMENSNGSYLNDSISPNESIDDEHLLIQHYCQSLNQDSPLSQPRSPAQILISLESEERGELERILADLEEENRNLQAEYDRLKQQHEHKGLSPLPSPPEMMPTSPQSPRDAELIAEAKLLRQHKGRLEARMQILEDHNKQLESQLHRLRQLLEQPQAEAKVNGTTVSSPSTSLQRSDSSQPMLLRVVGSQTSDSMGEEDLLSPPQDTSTGLEEVMEQLNNSFPSSRGRNTPGKPMREDTM

SEQ ID NO: 7 - DNA, 3789 bp, synthetic construct
  source 1..3789: mol_type = other DNA
atgctttggtgggaagaagtagaggactgttatgaaagagaagatgttcaaaagaaaacattcacaaaatgggtaaatgcacaattttctaagtttgggaagcagcatattgagaacctcttcagtgacctacaggatgggaggcgcctcctagacctcctcgaaggcctgacagggcaaaaactgccaaaagaaaaaggatccacaagagttcatgccctgaacaatgtcaacaaggcactgcgggttttgcagaacaataatgttgatttagtgaatattggaagtactgacatcgtagatggaaatcataaactgactcttggtttgatttggaatataatcctccactggcaggtcaaaaatgtaatgaaaaatatcatggctggattgcaacaaaccaacagtgaaaagattctcctgagctgggtccgacaatcaactcgtaattatccacaggttaatgtaatcaacttcaccaccagctggtctgatggcctggctttgaatgctctcatccatagtcataggccagacctatttgactggaatagtgtggtttgccagcagtcagccacacaacgactggaacatgcattcaacatcgccagatatcaattaggcatagagaaactactcgatcctgaagatgttgataccacctatccagataagaagtccatcttaatgtacatcacatcactcttccaagttttgcctcaacaagtgagcattgaagccatccaggaagtggaaatgttgccaaggccacctaaagtgactaaagaagaacattttcagttacatcatcaaatgcactattctcaacagatcacggtcagtctagcacagggatatgagagaacttcttcccctaagcctcgattcaagagctatgcctacacacaggctgcttatgtcaccacctctgaccctacacggagcccatttccttcacagcatttggaagctcctgaagacaagtcatttggcagttcattgatggagagtgaagtaaacctggaccgttatcaaacagctttagaagaagtattatcgtggcttctttctgctgaggacacattgcaagcacaaggagagatttctaatgatgtggaagtggtgaaagaccagtttcatactcatgaggggtacatgatggatttgacagcccatcagggccgggttggtaatattctacaattgggaagtaagctgattggaacaggaaaattatcagaagatgaagaaactgaagtacaagagcagatgaatctcctaaattcaagatgggaatgcctcagggtagctagcatggaaaaacaaagcaatttacatagagttttaatggatcgatttgacagatctgttgagaaatggcggcgttttcattatgatataaagatatttaatcagtggctaacagaagctgaacagtttctcagaaagacacaaattcctgagaattgggaacatgctaaatacaaatggtatcttaaggaactccaggatggcattgggcagcggcaaactgttgtcagaacattgaatgcaactggggaagaaataattcagcaatcctcaaaaacagatgccagtattctacaggaaaaattgggaagcctgaatctgcggtggcaggaggtctgcaaacagctgtcagacagaaaaaagaggctagaagaacaaaagaatatcttgtcagaatttcaaagagatttaaatgaatttgttttatggttggaggaagcagataacattgctagtatcccacttgaacctggaaaagagcagcaactaaaagaaaagcttgagcaagtcaagttactggtggaagagttgcccctgcgccagggaattctcaaacaattaaatgaaactggaggacccgtgcttgtaagtgctcccataagcccagaagagcaagataaacttgaaaataagctcaagcagacaaatctccagtggataaaggtttccagagctttacctgagaaacaaggagaaattgaagctcaaataaaagaccttgggcagcttgaaaaaaagcttgaagaccttgaagagcagttaaatcatctgctgctgtggttatctcctattaggaatcagttggaaatttataaccaaccaaaccaagaaggaccatttgacgttaaggaaactgaaatagcagttcaagctaaacaaccggatgtggaagagattttgtctaaagggcagcatttgtacaaggaaaaaccagccactcagccagtgaagaggaagttagaagatctgagctctgagtggaaggcggtaaaccgtttacttcaagagctgagggcaaagcagtggcagagaaaaatagatgagacccttgaaagactccgggaacttcaagaggccacggatgagctggacctcaagctgcgccaagctgaggtgatcaagggatcctggcagcccgtgggcgatctcctcattgactctctccaagatcacctcgagaaagtcaaggcacttcgaggagaaattgcgcctctgaaagagaacgtgagccacgtcaatgaccttgctcgccagcttaccactttgggcattcagctctcaccgtataacctcagcactctggaagacctgaacaccagatggaagcttctgcaggtggccgtcgaggaccgagtcaggcagctgcatgaagcccacagggactttggtccagcatctcagcactttctttccacgtctgtccagggtccctgggagagagccatctcgccaaacaaagtgccctactatatcaaccacgagactcaaacaacttgctgggaccatcccaaaatgacagagctctaccagtctttagctgacctgaataatgtcagattctcagcttataggactgccatgaaactccgaagactgcagaaggccctttgcttggatctcttgagcctgtcagctgcatgtgatgccttggaccagcacaacctcaagcaaaatgaccagcccatggatatcctgcagattattaattgtttgaccactatttatgaccgcctggagcaagagcacaacaatttggtcaacgtccctctctgcgtggatatgtgtctgaactggctgctgaatgtttatgatacgggacgaacagggaggatccgtgtcctgtcttttaaaactggcatcatttccctgtgtaaagcacatttggaagacaagtacagataccttttcaagcaagtggcaagttcaacaggattttgtgaccagcgcaggctgggcctccttctgcatgattctatccaaattccaagacagttgggtgaagttgcatcctttgggggcagtaacattgagccaagtgtccggagctgcttccaatttgctaataataagccagagatcgaagcggccctcttcctagactggatgagactggaaccccagtccatggtgtggctgcccgtcctgcacagagtggctgctgcagaaactgccaagcatcaggccaaatgtaacatctgcaaagagtgtccaatcattggattcaggtacaggagtctaaagcactttaattatgacatctgccaaagctgctttttttctggtcgagttgcaaaaggccataaaatgcactatcccatggtggaatattgcactccgactacatcaggagaagatgttcgagactttgccaaggtactaaaaaacaaatttcgaaccaaaaggtattttgcgaagcatccccgaatgggctacctgccagtgcagactgtcttagagggggacaacatggaaactccc

SEQ ID NO: 8 - DNA, 3858 bp, synthetic construct
  source 1..3858: mol_type = other DNA
atgctttggtgggaagaagtagaggactgttatgaaagagaagatgttcaaaagaaaacattcacaaaatgggtaaatgcacaattttctaagtttgggaagcagcatattgagaacctcttcagtgacctacaggatgggaggcgcctcctagacctcctcgaaggcctgacagggcaaaaactgccaaaagaaaaaggatccacaagagttcatgccctgaacaatgtcaacaaggcactgcgggttttgcagaacaataatgttgatttagtgaatattggaagtactgacatcgtagatggaaatcataaactgactcttggtttgatttggaatataatcctccactggcaggtcaaaaatgtaatgaaaaatatcatggctggattgcaacaaaccaacagtgaaaagattctcctgagctgggtccgacaatcaactcgtaattatccacaggttaatgtaatcaacttcaccaccagctggtctgatggcctggctttgaatgctctcatccatagtcataggccagacctatttgactggaatagtgtggtttgccagcagtcagccacacaacgactggaacatgcattcaacatcgccagatatcaattaggcatagagaaactactcgatcctgaagatgttgataccacctatccagataagaagtccatcttaatgtacatcacatcactcttccaagttttgcctcaacaagtgagcattgaagccatccaggaagtggaaatgttgccaaggccacctaaagtgactaaagaagaacattttcagttacatcatcaaatgcactattctcaacagatcacggtcagtctagcacagggatatgagagaacttcttcccctaagcctcgattcaagagctatgcctacacacaggctgcttatgtcaccacctctgaccctacacggagcccatttccttcacagcatttggaagctcctgaagacaagtcatttggcagttcattgatggagagtgaagtaaacctggaccgttatcaaacagctttagaagaagtattatcgtggcttctttctgctgaggacacattgcaagcacaaggagagatttctaatgatgtggaagtggtgaaagaccagtttcatactcatgaggggtacatgatggatttgacagcccatcagggccgggttggtaatattctacaattgggaagtaagctgattggaacaggaaaattatcagaagatgaagaaactgaagtacaagagcagatgaatctcctaaattcaagatgggaatgcctcagggtagctagcatggaaaaacaaagcaatttacatagagttttaatggatcgatttgacagatctgttgagaaatggcggcgttttcattatgatataaagatatttaatcagtggctaacagaagctgaacagtttctcagaaagacacaaattcctgagaattgggaacatgctaaatacaaatggtatcttaaggaactccaggatggcattgggcagcggcaaactgttgtcagaacattgaatgcaactggggaagaaataattcagcaatcctcaaaaacagatgccagtattctacaggaaaaattgggaagcctgaatctgcggtggcaggaggtctgcaaacagctgtcagacagaaaaaagaggctagaagaacaaaagaatatcttgtcagaatttcaaagagatttaaatgaatttgttttatggttggaggaagcagataacattgctagtatcccacttgaacctggaaaagagcagcaactaaaagaaaagcttgagcaagtcaagttactggtggaagagttgcccctgcgccagggaattctcaaacaattaaatgaaactggaggacccgtgcttgtaagtgctcccataagcccagaagagcaagataaacttgaaaataagctcaagcagacaaatctccagtggataaaggtttccagagctttacctgagaaacaaggagaaattgaagctcaaataaaagaccttgggcagcttgaaaaaaagcttgaagaccttgaagagcagttaaatcatctgctgctgtggttatctcctattaggaatcagttggaaatttataaccaaccaaaccaagaaggaccatttgacgttaaggaaactgaaatagcagttcaagctaaacaaccggatgtggaagagattttgtctaaagggcagcatttgtacaaggaaaaaccagccactcagccagtgaagaggaagttagaagatctgagctctgagtggaaggcggtaaaccgtttacttcaagagctgagggcaaagcagggtccagcatctcagcactttctttccacgtctgtccagggtccctgggagagagccatctcgccaaacaaagtgccctactatatcaaccacgagactcaaacaacttgctgggaccatcccaaaatgacagagctctaccagtctttagctgacctgaataatgtcagattctcagcttataggactgccatgaaactccgaagactgcagaaggccctttgcttggatctcttgagcctgtcagctgcatgtgatgccttggaccagcacaacctcaagcaaaatgaccagcccatggatatcctgcagattattaattgtttgaccactatttatgaccgcctggagcaagagcacaacaatttggtcaacgtccctctctgcgtggatatgtgtctgaactggctgctgaatgtttatgatacgggacgaacagggaggatccgtgtcctgtcttttaaaactggcatcatttccctgtgtaaagcacatttggaagacaagtacagataccttttcaagcaagtggcaagttcaacaggattttgtgaccagcgcaggctgggcctccttctgcatgattctatccaaattccaagacagttgggtgaagttgcatcctttgggggcagtaacattgagccaagtgtccggagctgcttccaatttgctaataataagccagagatcgaagcggccctcttcctagactggatgagactggaaccccagtccatggtgtggctgcccgtcctgcacagagtggctgctgcagaaactgccaagcatcaggccaaatgtaacatctgcaaagagtgtccaatcattggattcaggtacaggagtctaaagcactttaattatgacatctgccaaagctgctttttttctggtcgagttgcaaaaggccataaaatgcactatcccatggtggaatattgcactccgactacatcaggagaagatgttcgagactttgccaaggtactaaaaaacaaatttcgaaccaaaaggtattttgcgaagcatccccgaatgggctacctgccagtgcagactgtcttagagggggacaacatggaaactcccgttactctgatcaacttctggccagtagattctgcgcctgcctcgtcccctcagctttcacacgatgatactcattcacgcattgaacattatgctagcaggctagcagaaatggaaaacagcaatggatcttatctaaatgatagcatctctcctaatgagagcatagatgatgaacatttgttaatccagcattactgccaaagtttgaaccaggactcccccctgagccagcctcgtagtcctgcccagatcttgatttccttagagagtgaggaaagaggggagctagagagaatcctagcagatcttgaggaagaaaacaggaatctgcaagcagaatatgaccgtctaaagcagcagcacgaacataaaggcctgtccccactgccgtcccctcctgaaatgatgcccacctctccccagagtccc

SEQ ID NO: 9 - DNA, 3669 bp, synthetic construct
  source 1..3669: mol_type = other DNA
atgctttggtgggaagaagtagaggactgttatgaaagagaagatgttcaaaagaaaacattcacaaaatgggtaaatgcacaattttctaagtttgggaagcagcatattgagaacctcttcagtgacctacaggatgggaggcgcctcctagacctcctcgaaggcctgacagggcaaaaactgccaaaagaaaaaggatccacaagagttcatgccctgaacaatgtcaacaaggcactgcgggttttgcagaacaataatgttgatttagtgaatattggaagtactgacatcgtagatggaaatcataaactgactcttggtttgatttggaatataatcctccactggcaggtcaaaaatgtaatgaaaaatatcatggctggattgcaacaaaccaacagtgaaaagattctcctgagctgggtccgacaatcaactcgtaattatccacaggttaatgtaatcaacttcaccaccagctggtctgatggcctggctttgaatgctctcatccatagtcataggccagacctatttgactggaatagtgtggtttgccagcagtcagccacacaacgactggaacatgcattcaacatcgccagatatcaattaggcatagagaaactactcgatcctgaagatgttgataccacctatccagataagaagtccatcttaatgtacatcacatcactcttccaagttttgcctcaacaagtgagcattgaagccatccaggaagtggaaatgttgccaaggccacctaaagtgactaaagaagaacattttcagttacatcatcaaatgcactattctcaacagatcacggtcagtctagcacagggatatgagagaacttcttcccctaagcctcgattcaagagctatgcctacacacaggctgcttatgtcaccacctctgaccctacacggagcccatttccttcacagcatttggaagctcctgaagacaagtcatttggcagttcattgatggagagtgaagtaaacctggaccgttatcaaacagctttagaagaagtattatcgtggcttctttctgctgaggacacattgcaagcacaaggagagatttctaatgatgtggaagtggtgaaagaccagtttcatactcatgaggggtacatgatggatttgacagcccatcagggccgggttggtaatattctacaattgggaagtaagctgattggaacaggaaaattatcagaagatgaagaaactgaagtacaagagcagatgaatctcctaaattcaagatgggaatgcctcagggtagctagcatggaaaaacaaagcaatttacatagagttttaatggatcgatttgacagatctgttgagaaatggcggcgttttcattatgatataaagatatttaatcagtggctaacagaagctgaacagtttctcagaaagacacaaattcctgagaattgggaacatgctaaatacaaatggtatcttaaggaactccaggatggcattgggcagcggcaaactgttgtcagaacattgaatgcaactggggaagaaataattcagcaatcctcaaaaacagatgccagtattctacaggaaaaattgggaagcctgaatctgcggtggcaggaggtctgcaaacagctgtcagacagaaaaaagaggctagaagaacaaaagaatatcttgtcagaatttcaaagagatttaaatgaatttgttttatggttggaggaagcagataacattgctagtatcccacttgaacctggaaaagagcagcaactaaaagaaaagcttgagcaagtcaagttactggtggaagagttgcccctgcgccagggaattctcaaacaattaaatgaaactggaggacccgtgcttgtaagtgctcccataagcccagaagagcaagataaacttgaaaataagctcaagcagacaaatctccagtggataaaggtttccagagctttacctgagaaacaaggagaaattgaagctcaaataaaagaccttgggcagcttgaaaaaaagcttgaagaccttgaagagcagttaaatcatctgctgctgtggttatctcctattaggaatcagttggaaatttataaccaaccaaaccaagaaggaccatttgacgttaaggaaactgaaatagcagttcaagctaaacaaccggatgtggaagagattttgtctaaagggcagcatttgtacaaggaaaaaccagccactcagccagtgaagaggaagttagaagatctgagctctgagtggaaggcggtaaaccgtttacttcaagagctgagggcaaagcagggtccagcatctcagcactttctttccacgtctgtccagggtccctgggagagagccatctcgccaaacaaagtgccctactatatcaaccacgagactcaaacaacttgctgggaccatcccaaaatgacagagctctaccagtctttagctgacctgaataatgtcagattctcagcttataggactgccatgaaactccgaagactgcagaaggccctttgcttggatctcttgagcctgtcagctgcatgtgatgccttggaccagcacaacctcaagcaaaatgaccagcccatggatatcctgcagattattaattgtttgaccactatttatgaccgcctggagcaagagcacaacaatttggtcaacgtccctctctgcgtggatatgtgtctgaactggctgctgaatgtttatgatacgggacgaacagggaggatccgtgtcctgtcttttaaaactggcatcatttccctgtgtaaagcacatttggaagacaagtacagataccttttcaagcaagtggcaagttcaacaggattttgtgaccagcgcaggctgggcctccttctgcatgattctatccaaattccaagacagttgggtgaagttgcatcctttgggggcagtaacattgagccaagtgtccggagctgcttccaatttgctaataataagccagagatcgaagcggccctcttcctagactggatgagactggaaccccagtccatggtgtggctgcccgtcctgcacagagtggctgctgcagaaactgccaagcatcaggccaaatgtaacatctgcaaagagtgtccaatcattggattcaggtacaggagtctaaagcactttaattatgacatctgccaaagctgctttttttctggtcgagttgcaaaaggccataaaatgcactatcccatggtggaatattgcactccgactacatcaggagaagatgttcgagactttgccaaggtactaaaaaacaaatttcgaaccaaaaggtattttgcgaagcatccccgaatgggctacctgccagtgcagactgtcttagagggggacaacatggaaactcccgttactctgatcaacttctggccagtagattctgcgcctgcctcgtcccctcagctttcacacgatgatactcattcacgcattgaacattatgctagcaggctagcagaaatggaaaacagcaatggatcttatctaaatgatagcatctctcctaatgagagcatagatgatgaacatttgttaatccagcattactgccaaagtttgaaccaggactcccccctgagccagcctcgtagt

SEQ ID NO: 10 - DNA, 4221 bp, synthetic construct
  source 1..4221: mol_type = other DNA
atgctttggtgggaagaagtagaggactgttatgaaagagaagatgttcaaaagaaaacattcacaaaatgggtaaatgcacaattttctaagtttgggaagcagcatattgagaacctcttcagtgacctacaggatgggaggcgcctcctagacctcctcgaaggcctgacagggcaaaaactgccaaaagaaaaaggatccacaagagttcatgccctgaacaatgtcaacaaggcactgcgggttttgcagaacaataatgttgatttagtgaatattggaagtactgacatcgtagatggaaatcataaactgactcttggtttgatttggaatataatcctccactggcaggtcaaaaatgtaatgaaaaatatcatggctggattgcaacaaaccaacagtgaaaagattctcctgagctgggtccgacaatcaactcgtaattatccacaggttaatgtaatcaacttcaccaccagctggtctgatggcctggctttgaatgctctcatccatagtcataggccagacctatttgactggaatagtgtggtttgccagcagtcagccacacaacgactggaacatgcattcaacatcgccagatatcaattaggcatagagaaactactcgatcctgaagatgttgataccacctatccagataagaagtccatcttaatgtacatcacatcactcttccaagttttgcctcaacaagtgagcattgaagccatccaggaagtggaaatgttgccaaggccacctaaagtgactaaagaagaacattttcagttacatcatcaaatgcactattctcaacagatcacggtcagtctagcacagggatatgagagaacttcttcccctaagcctcgattcaagagctatgcctacacacaggctgcttatgtcaccacctctgaccctacacggagcccatttccttcacagcatttggaagctcctgaagacaagtcatttggcagttcattgatggagagtgaagtaaacctggaccgttatcaaacagctttagaagaagtattatcgtggcttctttctgctgaggacacattgcaagcacaaggagagatttctaatgatgtggaagtggtgaaagaccagtttcatactcatgaggggtacatgatggatttgacagcccatcagggccgggttggtaatattctacaattgggaagtaagctgattggaacaggaaaattatcagaagatgaagaaactgaagtacaagagcagatgaatctcctaaattcaagatgggaatgcctcagggtagctagcatggaaaaacaaagcaatttacatagagttttaatggatcgatttgacagatctgttgagaaatggcggcgttttcattatgatataaagatatttaatcagtggctaacagaagctgaacagtttctcagaaagacacaaattcctgagaattgggaacatgctaaatacaaatggtatcttaaggaactccaggatggcattgggcagcggcaaactgttgtcagaacattgaatgcaactggggaagaaataattcagcaatcctcaaaaacagatgccagtattctacaggaaaaattgggaagcctgaatctgcggtggcaggaggtctgcaaacagctgtcagacagaaaaaagaggctagaagaacaaaagaatatcttgtcagaatttcaaagagatttaaatgaatttgttttatggttggaggaagcagataacattgctagtatcccacttgaacctggaaaagagcagcaactaaaagaaaagcttgagcaagtcaagttactggtggaagagttgcccctgcgccagggaattctcaaacaattaaatgaaactggaggacccgtgcttgtaagtgctcccataagcccagaagagcaagataaacttgaaaataagctcaagcagacaaatctccagtggataaaggtttccagagctttacctgagaaacaaggagaaattgaagctcaaataaaagaccttgggcagcttgaaaaaaagcttgaagaccttgaagagcagttaaatcatctgctgctgtggttatctcctattaggaatcagttggaaatttataaccaaccaaaccaagaaggaccatttgacgttaaggaaactgaaatagcagttcaagctaaacaaccggatgtggaagagattttgtctaaagggcagcatttgtacaaggaaaaaccagccactcagccagtgaagaggaagttagaagatctgagctctgagtggaaggcggtaaaccgtttacttcaagagctgagggcaaagcagtggcagagaaaaatagatgagacccttgaaagactccgggaacttcaagaggccacggatgagctggacctcaagctgcgccaagctgaggtgatcaagggatcctggcagcccgtgggcgatctcctcattgactctctccaagatcacctcgagaaagtcaaggcacttcgaggagaaattgcgcctctgaaagagaacgtgagccacgtcaatgaccttgctcgccagcttaccactttgggcattcagctctcaccgtataacctcagcactctggaagacctgaacaccagatggaagcttctgcaggtggccgtcgaggaccgagtcaggcagctgcatgaagcccacagggactttggtccagcatctcagcactttctttccacgtctgtccagggtccctgggagagagccatctcgccaaacaaagtgccctactatatcaaccacgagactcaaacaacttgctgggaccatcccaaaatgacagagctctaccagtctttagctgacctgaataatgtcagattctcagcttataggactgccatgaaactccgaagactgcagaaggccctttgcttggatctcttgagcctgtcagctgcatgtgatgccttggaccagcacaacctcaagcaaaatgaccagcccatggatatcctgcagattattaattgtttgaccactatttatgaccgcctggagcaagagcacaacaatttggtcaacgtccctctctgcgtggatatgtgtctgaactggctgctgaatgtttatgatacgggacgaacagggaggatccgtgtcctgtcttttaaaactggcatcatttccctgtgtaaagcacatttggaagacaagtacagataccttttcaagcaagtggcaagttcaacaggattttgtgaccagcgcaggctgggcctccttctgcatgattctatccaaattccaagacagttgggtgaagttgcatcctttgggggcagtaacattgagccaagtgtccggagctgcttccaatttgctaataataagccagagatcgaagcggccctcttcctagactggatgagactggaaccccagtccatggtgtggctgcccgtcctgcacagagtggctgctgcagaaactgccaagcatcaggccaaatgtaacatctgcaaagagtgtccaatcattggattcaggtacaggagtctaaagcactttaattatgacatctgccaaagctgctttttttctggtcgagttgcaaaaggccataaaatgcactatcccatggtggaatattgcactccgactacatcaggagaagatgttcgagactttgccaaggtactaaaaaacaaatttcgaaccaaaaggtattttgcgaagcatccccgaatgggctacctgccagtgcagactgtcttagagggggacaacatggaaactcccgttactctgatcaacttctggccagtagattctgcgcctgcctcgtcccctcagctttcacacgatgatactcattcacgcattgaacattatgctagcaggctagcagaaatggaaaacagcaatggatcttatctaaatgatagcatctctcctaatgagagcatagatgatgaacatttgttaatccagcattactgccaaagtttgaaccaggactcccccctgagccagcctcgtagtcctgcccagatcttgatttccttagagagtgaggaaagaggggagctagagagaatcctagcagatcttgaggaagaaaacaggaatctgcaagcagaatatgaccgtctaaagcagcagcacgaacataaaggcctgtccccactgccgtcccctcctgaaatgatgcccacctctccccagagtccc

SEQ ID NO: 11 - DNA, 4254 bp, synthetic construct
  source 1..4254: mol_type = other DNA
atgctttggtgggaagaagtagaggactgttatgaaagagaagatgttcaaaagaaaacattcacaaaatgggtaaatgcacaattttctaagtttgggaagcagcatattgagaacctcttcagtgacctacaggatgggaggcgcctcctagacctcctcgaaggcctgacagggcaaaaactgccaaaagaaaaaggatccacaagagttcatgccctgaacaatgtcaacaaggcactgcgggttttgcagaacaataatgttgatttagtgaatattggaagtactgacatcgtagatggaaatcataaactgactcttggtttgatttggaatataatcctccactggcaggtcaaaaatgtaatgaaaaatatcatggctggattgcaacaaaccaacagtgaaaagattctcctgagctgggtccgacaatcaactcgtaattatccacaggttaatgtaatcaacttcaccaccagctggtctgatggcctggctttgaatgctctcatccatagtcataggccagacctatttgactggaatagtgtggtttgccagcagtcagccacacaacgactggaacatgcattcaacatcgccagatatcaattaggcatagagaaactactcgatcctgaagatgttgataccacctatccagataagaagtccatcttaatgtacatcacatcactcttccaagttttgcctcaacaagtgagcattgaagccatccaggaagtggaaatgttgccaaggccacctaaagtgactaaagaagaacattttcagttacatcatcaaatgcactattctcaacagatcacggtcagtctagcacagggatatgagagaacttcttcccctaagcctcgattcaagagctatgcctacacacaggctgcttatgtcaccacctctgaccctacacggagcccatttccttcacagcatttggaagctcctgaagacaagtcatttggcagttcattgatggagagtgaagtaaacctggaccgttatcaaacagctttagaagaagtattatcgtggcttctttctgctgaggacacattgcaagcacaaggagagatttctaatgatgtggaagtggtgaaagaccagtttcatactcatgaggggtacatgatggatttgacagcccatcagggccgggttggtaatattctacaattgggaagtaagctgattggaacaggaaaattatcagaagatgaagaaactgaagtacaagagcagatgaatctcctaaattcaagatgggaatgcctcagggtagctagcatggaaaaacaaagcaatttacatagagttttaatggatcgatttgacagatctgttgagaaatggcggcgttttcattatgatataaagatatttaatcagtggctaacagaagctgaacagtttctcagaaagacacaaattcctgagaattgggaacatgctaaatacaaatggtatcttaaggaactccaggatggcattgggcagcggcaaactgttgtcagaacattgaatgcaactggggaagaaataattcagcaatcctcaaaaacagatgccagtattctacaggaaaaattgggaagcctgaatctgcggtggcaggaggtctgcaaacagctgtcagacagaaaaaagaggctagaagaacaaaagaatatcttgtcagaatttcaaagagatttaaatgaatttgttttatggttggaggaagcagataacattgctagtatcccacttgaacctggaaaagagcagcaactaaaagaaaagcttgagcaagtcaagttactggtggaagagttgcccctgcgccagggaattctcaaacaattaaatgaaactggaggacccgtgcttgtaagtgctcccataagcccagaagagcaagataaacttgaaaataagctcaagcagacaaatctccagtggataaaggtttccagagctttacctgagaaacaaggagaaattgaagctcaaataaaagaccttgggcagcttgaaaaaaagcttgaagaccttgaagagcagttaaatcatctgctgctgtggttatctcctattaggaatcagttggaaatttataaccaaccaaaccaagaaggaccatttgacgttaaggaaactgaaatagcagttcaagctaaacaaccggatgtggaagagattttgtctaaagggcagcatttgtacaaggaaaaaccagccactcagccagtgaagaggaagttagaagatctgagctctgagtggaaggcggtaaaccgtttacttcaagagctgagggcaaagcagggtccagcatctcagcactttctttccacgtctgtccagggtccctgggagagagccatctcgccaaacaaagtgccctactatatcaaccacgagactcaaacaacttgctgggaccatcccaaaatgacagagctctaccagtctttagctgacctgaataatgtcagattctcagcttataggactgccatgaaactccgaagactgcagaaggccctttgcttggatctcttgagcctgtcagctgcatgtgatgccttggaccagcacaacctcaagcaaaatgaccagcccatggatatcctgcagattattaattgtttgaccactatttatgaccgcctggagcaagagcacaacaatttggtcaacgtccctctctgcgtggatatgtgtctgaactggctgctgaatgtttatgatacgggacgaacagggaggatccgtgtcctgtcttttaaaactggcatcatttccctgtgtaaagcacatttggaagacaagtacagataccttttcaagcaagtggcaagttcaacaggattttgtgaccagcgcaggctgggcctccttctgcatgattctatccaaattccaagacagttgggtgaagttgcatcctttgggggcagtaacattgagccaagtgtccggagctgcttccaatttgctaataataagccagagatcgaagcggccctcttcctagactggatgagactggaaccccagtccatggtgtggctgcccgtcctgcacagagtggctgctgcagaaactgccaagcatcaggccaaatgtaacatctgcaaagagtgtccaatcattggattcaggtacaggagtctaaagcactttaattatgacatctgccaaagctgctttttttctggtcgagttgcaaaaggccataaaatgcactatcccatggtggaatattgcactccgactacatcaggagaagatgttcgagactttgccaaggtactaaaaaacaaatttcgaaccaaaaggtattttgcgaagcatccccgaatgggctacctgccagtgcagactgtcttagagggggacaacatggaaactcccgttactctgatcaacttctggccagtagattctgcgcctgcctcgtcccctcagctttcacacgatgatactcattcacgcattgaacattatgctagcaggctagcagaaatggaaaacagcaatggatcttatctaaatgatagcatctctcctaatgagagcatagatgatgaacatttgttaatccagcattactgccaaagtttgaaccaggactcccccctgagccagcctcgtagtcctgcccagatcttgatttccttagagagtgaggaaagaggggagctagagagaatcctagcagatcttgaggaagaaaacaggaatctgcaagcagaatatgaccgtctaaagcagcagcacgaacataaaggcctgtccccactgccgtcccctcctgaaatgatgcccacctctccccagagtccccgggatgctgagctcattgctgaggccaagctactgcgtcaacacaaaggccgcctggaagccaggatgcaaatcctggaagaccacaataaacagctggagtcacagttacacaggctaaggcagctgctggagcaaccccaggcagaggccaaagtgaatggcacaacggtgtcctctccttctacctctctacagaggtccgacagcagtcagcctatgctgctccgagtggttggcagtcaaacttcggactccatgggtgaggaagatcttctcagtcctccccaggacacaagcacagggttagaggaggtgatggagcaactcaacaactccttccctagttcaagaggaagaaatacccctggaaagccaatgagagaggacacaatg

SEQ ID NO: 12 - DNA, 4617 bp, synthetic construct
  source 1..4617: mol_type = other DNA
atgctttggtgggaagaagtagaggactgttatgaaagagaagatgttcaaaagaaaacattcacaaaatgggtaaatgcacaattttctaagtttgggaagcagcatattgagaacctcttcagtgacctacaggatgggaggcgcctcctagacctcctcgaaggcctgacagggcaaaaactgccaaaagaaaaaggatccacaagagttcatgccctgaacaatgtcaacaaggcactgcgggttttgcagaacaataatgttgatttagtgaatattggaagtactgacatcgtagatggaaatcataaactgactcttggtttgatttggaatataatcctccactggcaggtcaaaaatgtaatgaaaaatatcatggctggattgcaacaaaccaacagtgaaaagattctcctgagctgggtccgacaatcaactcgtaattatccacaggttaatgtaatcaacttcaccaccagctggtctgatggcctggctttgaatgctctcatccatagtcataggccagacctatttgactggaatagtgtggtttgccagcagtcagccacacaacgactggaacatgcattcaacatcgccagatatcaattaggcatagagaaactactcgatcctgaagatgttgataccacctatccagataagaagtccatcttaatgtacatcacatcactcttccaagttttgcctcaacaagtgagcattgaagccatccaggaagtggaaatgttgccaaggccacctaaagtgactaaagaagaacattttcagttacatcatcaaatgcactattctcaacagatcacggtcagtctagcacagggatatgagagaacttcttcccctaagcctcgattcaagagctatgcctacacacaggctgcttatgtcaccacctctgaccctacacggagcccatttccttcacagcatttggaagctcctgaagacaagtcatttggcagttcattgatggagagtgaagtaaacctggaccgttatcaaacagctttagaagaagtattatcgtggcttctttctgctgaggacacattgcaagcacaaggagagatttctaatgatgtggaagtggtgaaagaccagtttcatactcatgaggggtacatgatggatttgacagcccatcagggccgggttggtaatattctacaattgggaagtaagctgattggaacaggaaaattatcagaagatgaagaaactgaagtacaagagcagatgaatctcctaaattcaagatgggaatgcctcagggtagctagcatggaaaaacaaagcaatttacatagagttttaatggatcgatttgacagatctgttgagaaatggcggcgttttcattatgatataaagatatttaatcagtggctaacagaagctgaacagtttctcagaaagacacaaattcctgagaattgggaacatgctaaatacaaatggtatcttaaggaactccaggatggcattgggcagcggcaaactgttgtcagaacattgaatgcaactggggaagaaataattcagcaatcctcaaaaacagatgccagtattctacaggaaaaattgggaagcctgaatctgcggtggcaggaggtctgcaaacagctgtcagacagaaaaaagaggctagaagaacaaaagaatatcttgtcagaatttcaaagagatttaaatgaatttgttttatggttggaggaagcagataacattgctagtatcccacttgaacctggaaaagagcagcaactaaaagaaaagcttgagcaagtcaagttactggtggaagagttgcccctgcgccagggaattctcaaacaattaaatgaaactggaggacccgtgcttgtaagtgctcccataagcccagaagagcaagataaacttgaaaataagctcaagcagacaaatctccagtggataaaggtttccagagctttacctgagaaacaaggagaaattgaagctcaaataaaagaccttgggcagcttgaaaaaaagcttgaagaccttgaagagcagttaaatcatctgctgctgtggttatctcctattaggaatcagttggaaatttataaccaaccaaaccaagaaggaccatttgacgttaaggaaactgaaatagcagttcaagctaaacaaccggatgtggaagagattttgtctaaagggcagcatttgtacaaggaaaaaccagccactcagccagtgaagaggaagttagaagatctgagctctgagtggaaggcggtaaaccgtttacttcaagagctgagggcaaagcagtggcagagaaaaatagatgagacccttgaaagactccgggaacttcaagaggccacggatgagctggacctcaagctgcgccaagctgaggtgatcaagggatcctggcagcccgtgggcgatctcctcattgactctctccaagatcacctcgagaaagtcaaggcacttcgaggagaaattgcgcctctgaaagagaacgtgagccacgtcaatgaccttgctcgccagcttaccactttgggcattcagctctcaccgtataacctcagcactctggaagacctgaacaccagatggaagcttctgcaggtggccgtcgaggaccgagtcaggcagctgcatgaagcccacagggactttggtccagcatctcagcactttctttccacgtctgtccagggtccctgggagagagccatctcgccaaacaaagtgccctactatatcaaccacgagactcaaacaacttgctgggaccatcccaaaatgacagagctctaccagtctttagctgacctgaataatgtcagattctcagcttataggactgccatgaaactccgaagactgcagaaggccctttgcttggatctcttgagcctgtcagctgcatgtgatgccttggaccagcacaacctcaagcaaaatgaccagcccatggatatcctgcagattattaattgtttgaccactatttatgaccgcctggagcaagagcacaacaatttggtcaacgtccctctctgcgtggatatgtgtctgaactggctgctgaatgtttatgatacgggacgaacagggaggatccgtgtcctgtcttttaaaactggcatcatttccctgtgtaaagcacatttggaagacaagtacagataccttttcaagcaagtggcaagttcaacaggattttgtgaccagcgcaggctgggcctccttctgcatgattctatccaaattccaagacagttgggtgaagttgcatcctttgggggcagtaacattgagccaagtgtccggagctgcttccaatttgctaataataagccagagatcgaagcggccctcttcctagactggatgagactggaaccccagtccatggtgtggctgcccgtcctgcacagagtggctgctgcagaaactgccaagcatcaggccaaatgtaacatctgcaaagagtgtccaatcattggattcaggtacaggagtctaaagcactttaattatgacatctgccaaagctgctttttttctggtcgagttgcaaaaggccataaaatgcactatcccatggtggaatattgcactccgactacatcaggagaagatgttcgagactttgccaaggtactaaaaaacaaatttcgaaccaaaaggtattttgcgaagcatccccgaatgggctacctgccagtgcagactgtcttagagggggacaacatggaaactcccgttactctgatcaacttctggccagtagattctgcgcctgcctcgtcccctcagctttcacacgatgatactcattcacgcattgaacattatgctagcaggctagcagaaatggaaaacagcaatggatcttatctaaatgatagcatctctcctaatgagagcatagatgatgaacatttgttaatccagcattactgccaaagtttgaaccaggactcccccctgagccagcctcgtagtcctgcccagatcttgatttccttagagagtgaggaaagaggggagctagagagaatcctagcagatcttgaggaagaaaacaggaatctgcaagcagaatatgaccgtctaaagcagcagcacgaacataaaggcctgtccccactgccgtcccctcctgaaatgatgcccacctctccccagagtccccgggatgctgagctcattgctgaggccaagctactgcgtcaacacaaaggccgcctggaagccaggatgcaaatcctggaagaccacaataaacagctggagtcacagttacacaggctaaggcagctgctggagcaaccccaggcagaggccaaagtgaatggcacaacggtgtcctctccttctacctctctacagaggtccgacagcagtcagcctatgctgctccgagtggttggcagtcaaacttcggactccatgggtgaggaagatcttctcagtcctccccaggacacaagcacagggttagaggaggtgatggagcaactcaacaactccttccctagttcaagaggaagaaatacccctggaaagccaatgagagaggacacaatg

SEQ ID NO: 13 - protein, 1277 aa, synthetic construct
MLWWEEVEDCYEREDVQKKTFTKWVNAQFSKFGKQHIENLFSDLQDGRRLLDLLEGLTGQKLPKEKGSTRVHALNNVNKALRVLQNNNVDLVNIGSTDIVDGNHKLTLGLIWNIILHWQVKNVMKNIMAGLQQTNSEKILLSWVRQSTRNYPQVNVINFTTSWSDGLALNALIHSHRPDLFDWNSVVCQQSATQRLEHAFNIARYQLGIEKLLDPEDVDTTYPDKKSILMYITSLFQVLPQQVSIEAIQEVEMLPRPPKVTKEEHFQLHHQMHYSQQITVSLAQGYERTSSPKPRFKSYAYTQAAYVTTSDPTRSPFPSQHLEAPEDKSFGSSLMESEVNLDRYQTALEEVLSWLLSAEDTLQAQGEISNDVEVVKDQFHTHEGYMMDLTAHQGRVGNILQLGSKLIGTGKLSEDEETEVQEQMNLLNSRWECLRVASMEKQSNLHRVLMDLQNQKLKELNDWLTKTEERTRKMEEEPLGPDLEDLKRQVQQHKVLQEDLEQEQVRVNSLTHMVVVVDESSGDHATAALEEQLKVLGDRWANICRWTEDRWVLLQDHTVREETMMVMTEDMPLEISYVPSTYLTEITHVSQALLEVEQLLNAPDLCAKDFEDLFKQEESLKNIKDSLQQSSGRIDIIHSKKTAALQSATPVERVKLQEALSQLDFQWEKVNKMYKDRQGRFDRSVEKWRRFHYDIKIFNQWLTEAEQFLRKTQIPENWEHAKYKWYLKELQDGIGQRQTVVRTLNATGEEIIQQSSKTDASILQEKLGSLNLRWQEVCKQLSDRKKRLEEQKWQRKIDETLERLQELQEATDELDLKLRQAEVIKGSWQPVGDLLIDSLQDHLEKVKALRGEIAPLKENVSHVNDLARQLTTLGIQLSPYNLSTLEDLNTRWKLLQVAVEDRVRQLHEAHRDFGPASQHFLSTSVQGPWERAISPNKVPYYINHETQTTCWDHPKMTELYQSLADLNNVRFSAYRTAMKLRRLQKALCLDLLSLSAACDALDQHNLKQNDQPMDILQIINCLTTIYDRLEQEHNNLVNVPLCVDMCLNWLLNVYDTGRTGRIRVLSFKTGIISLCKAHLEDKYRYLFKQVASSTGFCDQRRLGLLLHDSIQIPRQLGEVASFGGSNIEPSVRSCFQFANNKPEIEAALFLDWMRLEPQSMVWLPVLHRVAAAETAKHQAKCNICKECPIIGFRYRSLKHFNYDICQSCFFSGRVAKGHKMHYPMVEYCTPTTSGEDVRDFAKVLKNKFRTKRYFAKHPRMGYLPVQTVLEGDNMETP

SEQ ID NO: 14 - protein, 1237 aa, synthetic construct
MLWWEEVEDCYEREDVQKKTFTKWVNAQFSKFGKQHIENLFSDLQDGRRLLDLLEGLTGQKLPKEKGSTRVHALNNVNKALRVLQNNNVDLVNIGSTDIVDGNHKLTLGLIWNIILHWQVKNVMKNIMAGLQQTNSEKILLSWVRQSTRNYPQVNVINFTTSWSDGLALNALIHSHRPDLFDWNSVVCQQSATQRLEHAFNIARYQLGIEKLLDPEDVDTTYPDKKSILMYITSLFQVLPQQVSIEAIQEVEMLPRPPKVTKEEHFQLHHQMHYSQQITVSLAQGYERTSSPKPRFKSYAYTQAAYVTTSDPTRSPFPSQHLEAPEDKSFGSSLMESEVNLDRYQTALEEVLSWLLSAEDTLQAQGEISNDVEVVKDQFHTHEGYMMDLTAHQGRVGNILQLGSKLIGTGKLSEDEETEVQEQMNLLNSRWECLRVASMEKQSNLHRVLMDLQNQKLKELNDWLTKTEERTRKMEEEPLGPDLEDLKRQVQQHKVLQEDLEQEQVRVNSLTHMVVVVDESSGDHATAALEEQLKVLGDRWANICRWTEDRWVLLQDHTVREETMMVMTEDMPLEISYVPSTYLTEITHVSQALLEVEQLLNAPDLCAKDFEDLFKQEESLKNIKDSLQQSSGRIDIIHSKKTAALQSATPVERVKLQEALSQLDFQWEKVNKMYKDRQGRFDRSVEKWRRFHYDIKIFNQWLTEAEQFLRKTQIPENWEHAKYKWYLKELQDGIGQRQTVVRTLNATGEEIIQQSSKTDASILQEKLGSLNLRWQEVCKQLSDRKKRLEEQKGPASQHFLSTSVQGPWERAISPNKVPYYINHETQTTCWDHPKMTELYQSLADLNNVRFSAYRTAMKLRRLQKALCLDLLSLSAACDALDQHNLKQNDQPMDILQIINCLTTIYDRLEQEHNNLVNVPLCVDMCLNWLLNVYDTGRTGRIRVLSFKTGIISLCKAHLEDKYRYLFKQVASSTGFCDQRRLGLLLHDSIQIPRQLGEVASFGGSNIEPSVRSCFQFANNKPEIEAALFLDWMRLEPQSMVWLPVLHRVAAAETAKHQAKCNICKECPIIGFRYRSLKHFNYDICQSCFFSGRVAKGHKMHYPMVEYCTPTTSGEDVRDFAKVLKNKFRTKRYFAKHPRMGYLPVQTVLEGDNMETPVTLINFWPVDSAPASSPQLSHDDTHSRIEHYASRLAEMENSNGSYLNDSISPNESIDDEHLLIQHYCQSLNQDSPLSQPRS

SEQ ID NO: 15 - protein, 1300 aa, synthetic construct
MLWWEEVEDCYEREDVQKKTFTKWVNAQFSKFGKQHIENLFSDLQDGRRLLDLLEGLTGQKLPKEKGSTRVHALNNVNKALRVLQNNNVDLVNIGSTDIVDGNHKLTLGLIWNIILHWQVKNVMKNIMAGLQQTNSEKILLSWVRQSTRNYPQVNVINFTTSWSDGLALNALIHSHRPDLFDWNSVVCQQSATQRLEHAFNIARYQLGIEKLLDPEDVDTTYPDKKSILMYITSLFQVLPQQVSIEAIQEVEMLPRPPKVTKEEHFQLHHQMHYSQQITVSLAQGYERTSSPKPRFKSYAYTQAAYVTTSDPTRSPFPSQHLEAPEDKSFGSSLMESEVNLDRYQTALEEVLSWLLSAEDTLQAQGEISNDVEVVKDQFHTHEGYMMDLTAHQGRVGNILQLGSKLIGTGKLSEDEETEVQEQMNLLNSRWECLRVASMEKQSNLHRVLMDLQNQKLKELNDWLTKTEERTRKMEEEPLGPDLEDLKRQVQQHKVLQEDLEQEQVRVNSLTHMVVVVDESSGDHATAALEEQLKVLGDRWANICRWTEDRWVLLQDHTVREETMMVMTEDMPLEISYVPSTYLTEITHVSQALLEVEQLLNAPDLCAKDFEDLFKQEESLKNIKDSLQQSSGRIDIIHSKKTAALQSATPVERVKLQEALSQLDFQWEKVNKMYKDRQGRFDRSVEKWRRFHYDIKIFNQWLTEAEQFLRKTQIPENWEHAKYKWYLKELQDGIGQRQTVVRTLNATGEEIIQQSSKTDASILQEKLGSLNLRWQEVCKQLSDRKKRLEEQKGPASQHFLSTSVQGPWERAISPNKVPYYINHETQTTCWDHPKMTELYQSLADLNNVRFSAYRTAMKLRRLQKALCLDLLSLSAACDALDQHNLKQNDQPMDILQIINCLTTIYDRLEQEHNNLVNVPLCVDMCLNWLLNVYDTGRTGRIRVLSFKTGIISLCKAHLEDKYRYLFKQVASSTGFCDQRRLGLLLHDSIQIPRQLGEVASFGGSNIEPSVRSCFQFANNKPEIEAALFLDWMRLEPQSMVWLPVLHRVAAAETAKHQAKCNICKECPIIGFRYRSLKHFNYDICQSCFFSGRVAKGHKMHYPMVEYCTPTTSGEDVRDFAKVLKNKFRTKRYFAKHPRMGYLPVQTVLEGDNMETPVTLINFWPVDSAPASSPQLSHDDTHSRIEHYASRLAEMENSNGSYLNDSISPNESIDDEHLLIQHYCQSLNQDSPLSQPRSPAQILISLESEERGELERILADLEEENRNLQAEYDRLKQQHEHKGLSPLPSPPEMMPTSPQSP

SEQ ID NO: 16 - protein, 1421 aa, synthetic construct
MLWWEEVEDCYEREDVQKKTFTKWVNAQFSKFGKQHIENLFSDLQDGRRLLDLLEGLTGQKLPKEKGSTRVHALNNVNKALRVLQNNNVDLVNIGSTDIVDGNHKLTLGLIWNIILHWQVKNVMKNIMAGLQQTNSEKILLSWVRQSTRNYPQVNVINFTTSWSDGLALNALIHSHRPDLFDWNSVVCQQSATQRLEHAFNIARYQLGIEKLLDPEDVDTTYPDKKSILMYITSLFQVLPQQVSIEAIQEVEMLPRPPKVTKEEHFQLHHQMHYSQQITVSLAQGYERTSSPKPRFKSYAYTQAAYVTTSDPTRSPFPSQHLEAPEDKSFGSSLMESEVNLDRYQTALEEVLSWLLSAEDTLQAQGEISNDVEVVKDQFHTHEGYMMDLTAHQGRVGNILQLGSKLIGTGKLSEDEETEVQEQMNLLNSRWECLRVASMEKQSNLHRVLMDLQNQKLKELNDWLTKTEERTRKMEEEPLGPDLEDLKRQVQQHKVLQEDLEQEQVRVNSLTHMVVVVDESSGDHATAALEEQLKVLGDRWANICRWTEDRWVLLQDHTVREETMMVMTEDMPLEISYVPSTYLTEITHVSQALLEVEQLLNAPDLCAKDFEDLFKQEESLKNIKDSLQQSSGRIDIIHSKKTAALQSATPVERVKLQEALSQLDFQWEKVNKMYKDRQGRFDRSVEKWRRFHYDIKIFNQWLTEAEQFLRKTQIPENWEHAKYKWYLKELQDGIGQRQTVVRTLNATGEEIIQQSSKTDASILQEKLGSLNLRWQEVCKQLSDRKKRLEEQKWQRKIDETLERLQELQEATDELDLKLRQAEVIKGSWQPVGDLLIDSLQDHLEKVKALRGEIAPLKENVSHVNDLARQLTTLGIQLSPYNLSTLEDLNTRWKLLQVAVEDRVRQLHEAHRDFGPASQHFLSTSVQGPWERAISPNKVPYYINHETQTTCWDHPKMTELYQSLADLNNVRFSAYRTAMKLRRLQKALCLDLLSLSAACDALDQHNLKQNDQPMDILQIINCLTTIYDRLEQEHNNLVNVPLCVDMCLNWLLNVYDTGRTGRIRVLSFKTGIISLCKAHLEDKYRYLFKQVASSTGFCDQRRLGLLLHDSIQIPRQLGEVASFGGSNIEPSVRSCFQFANNKPEIEAALFLDWMRLEPQSMVWLPVLHRVAAAETAKHQAKCNICKECPIIGFRYRSLKHFNYDICQSCFFSGRVAKGHKMHYPMVEYCTPTTSGEDVRDFAKVLKNKFRTKRYFAKHPRMGYLPVQTVLEGDNMETPVTLINFWPVDSAPASSPQLSHDDTHSRIEHYASRLAEMENSNGSYLNDSISPNESIDDEHLLIQHYCQSLNQDSPLSQPRSPAQILISLESEERGELERILADLEEENRNLQAEYDRLKQQHEHKGLSPLPSPPEMMPTSPQSP

SEQ ID NO: 17 - protein, 1431 aa, synthetic construct
MLWWEEVEDCYEREDVQKKTFTKWVNAQFSKFGKQHIENLFSDLQDGRRLLDLLEGLTGQKLPKEKGSTRVHALNNVNKALRVLQNNNVDLVNIGSTDIVDGNHKLTLGLIWNIILHWQVKNVMKNIMAGLQQTNSEKILLSWVRQSTRNYPQVNVINFTTSWSDGLALNALIHSHRPDLFDWNSVVCQQSATQRLEHAFNIARYQLGIEKLLDPEDVDTTYPDKKSILMYITSLFQVLPQQVSIEAIQEVEMLPRPPKVTKEEHFQLHHQMHYSQQITVSLAQGYERTSSPKPRFKSYAYTQAAYVTTSDPTRSPFPSQHLEAPEDKSFGSSLMESEVNLDRYQTALEEVLSWLLSAEDTLQAQGEISNDVEVVKDQFHTHEGYMMDLTAHQGRVGNILQLGSKLIGTGKLSEDEETEVQEQMNLLNSRWECLRVASMEKQSNLHRVLMDLQNQKLKELNDWLTKTEERTRKMEEEPLGPDLEDLKRQVQQHKVLQEDLEQEQVRVNSLTHMVVVVDESSGDHATAALEEQLKVLGDRWANICRWTEDRWVLLQDHLSLQELLVWLQLKDDELSRQAPIGGDFPAVQKQNDVHRAFKRELKTKEPVIMSTLETVRIFLTEQPLEGLEKLYQEPRELPPEERAQNVTRLLRKQAEEVNTEWEKLNLHSADWQRKIDETLERLQELQEATDELDLKLRQAEVIKGSWQPVGDLLIDSLQDHLEKVKALRGEIAPLKENVSHVNDLARQLTTLGIQLSPYNLSTLEDLNTRWKLLQVAVEDRVRQLHEAHRDFGPASQHFLSTSVQGPWERAISPNKVPYYINHETQTTCWDHPKMTELYQSLADLNNVRFSAYRTAMKLRRLQKALCLDLLSLSAACDALDQHNLKQNDQPMDILQIINCLTTIYDRLEQEHNNLVNVPLCVDMCLNWLLNVYDTGRTGRIRVLSFKTGIISLCKAHLEDKYRYLFKQVASSTGFCDQRRLGLLLHDSIQIPRQLGEVASFGGSNIEPSVRSCFQFANNKPEIEAALFLDWMRLEPQSMVWLPVLHRVAAAETAKHQAKCNICKECPIIGFRYRSLKHFNYDICQSCFFSGRVAKGHKMHYPMVEYCTPTTSGEDVRDFAKVLKNKFRTKRYFAKHPRMGYLPVQTVLEGDNMETPVTLINFWPVDSAPASSPQLSHDDTHSRIEHYASRLAEMENSNGSYLNDSISPNESIDDEHLLIQHYCQSLNQDSPLSQPRSPAQILISLESEERGELERILADLEEENRNLQAEYDRLKQQHEHKGLSPLPSPPEMMPTSPQSPRDAELIAEAKLLRQHKGRLEARMQILEDHNKQLESQLHRLRQLLEQPQAEAKVNGTTVSSPSTSLQRSDSSQPMLLRVVGSQTSDSMGEEDLLSPPQDTSTGLEEVMEQLNNSFPSSRGRNTPGKPMREDTM

SEQ ID NO: 18 - protein, 1432 aa, synthetic construct
MLWWEEVEDCYEREDVQKKTFTKWVNAQFSKFGKQHIENLFSDLQDGRRLLDLLEGLTGQKLPKEKGSTRVHALNNVNKALRVLQNNNVDLVNIGSTDIVDGNHKLTLGLIWNIILHWQVKNVMKNIMAGLQQTNSEKILLSWVRQSTRNYPQVNVINFTTSWSDGLALNALIHSHRPDLFDWNSVVCQQSATQRLEHAFNIARYQLGIEKLLDPEDVDTTYPDKKSILMYITSLFQVLPQQVSIEAIQEVEMLPRPPKVTKEEHFQLHHQMHYSQQITVSLAQGYERTSSPKPRFKSYAYTQAAYVTTSDPTRSPFPSQHLEAPEDKSFGSSLMESEVNLDRYQTALEEVLSWLLSAEDTLQAQGEISNDVEVVKDQFHTHEGYMMDLTAHQGRVGNILQLGSKLIGTGKLSEDEETEVQEQMNLLNSRWECLRVASMEKQSNLHRVLMDLQNQKLKELNDWLTKTEERTRKMEEEPLGPDLEDLKRQVQQHKVLQEDLEQEQVRVNSLTHMVVVVDESSGDHATAALEEQLKVLGDRWANICRWTEDRWVLLQDHTVREETMMVMTEDMPLEISYVPSTYLTEITHVSQALLEVEQLLNAPDLCAKDFEDLFKQEESLKNIKDSLQQSSGRIDIIHSKKTAALQSATPVERVKLQEALSQLDFQWEKVNKMYKDRQGRFDRSVEKWRRFHYDIKIFNQWLTEAEQFLRKTQIPENWEHAKYKWYLKELQDGIGQRQTVVRTLNATGEEIIQQSSKTDASILQEKLGSLNLRWQEVCKQLSDRKKRLEEQKGPASQHFLSTSVQGPWERAISPNKVPYYINHETQTTCWDHPKMTELYQSLADLNNVRFSAYRTAMKLRRLQKALCLDLLSLSAACDALDQHNLKQNDQPMDILQIINCLTTIYDRLEQEHNNLVNVPLCVDMCLNWLLNVYDTGRTGRIRVLSFKTGIISLCKAHLEDKYRYLFKQVASSTGFCDQRRLGLLLHDSIQIPRQLGEVASFGGSNIEPSVRSCFQFANNKPEIEAALFLDWMRLEPQSMVWLPVLHRVAAAETAKHQAKCNICKECPIIGFRYRSLKHFNYDICQSCFFSGRVAKGHKMHYPMVEYCTPTTSGEDVRDFAKVLKNKFRTKRYFAKHPRMGYLPVQTVLEGDNMETPVTLINFWPVDSAPASSPQLSHDDTHSRIEHYASRLAEMENSNGSYLNDSISPNESIDDEHLLIQHYCQSLNQDSPLSQPRSPAQILISLESEERGELERILADLEEENRNLQAEYDRLKQQHEHKGLSPLPSPPEMMPTSPQSPRDAELIAEAKLLRQHKGRLEARMQILEDHNKQLESQLHRLRQLLEQPQAEAKVNGTTVSSPSTSLQRSDSSQPMLLRVVGSQTSDSMGEEDLLSPPQDTSTGLEEVMEQLNNSFPSSRGRNTPGKPMREDTM

SEQ ID NO: 19 - protein, 1448 aa, synthetic construct
MLWWEEVEDCYEREDVQKKTFTKWVNAQFSKFGKQHIENLFSDLQDGRRLLDLLEGLTGQKLPKEKGSTRVHALNNVNKALRVLQNNNVDLVNIGSTDIVDGNHKLTLGLIWNIILHWQVKNVMKNIMAGLQQTNSEKILLSWVRQSTRNYPQVNVINFTTSWSDGLALNALIHSHRPDLFDWNSVVCQQSATQRLEHAFNIARYQLGIEKLLDPEDVDTTYPDKKSILMYITSLFQVLPQQVSIEAIQEVEMLPRPPKVTKEEHFQLHHQMHYSQQITVSLAQGYERTSSPKPRFKSYAYTQAAYVTTSDPTRSPFPSQHLEAPEDKSFGSSLMESEVNLDRYQTALEEVLSWLLSAEDTLQAQGEISNDVEVVKDQFHTHEGYMMDLTAHQGRVGNILQLGSKLIGTGKLSEDEETEVQEQMNLLNSRWECLRVASMEKQSNLHRVLMDHTVREETMMVMTEDMPLEISYVPSTYLTEITHVSQALLEVEQLLNAPDLCAKDFEDLFKQEESLKNIKDSLQQSSGRIDIIHSKKTAALQSATPVERVKLQEALSQLDFQWEKVNKMYKDRQGRFDRSVEKWRRFHYDIKIFNQWLTEAEQFLRKTQIPENWEHAKYKWYLKELQDGIGQRQTVVRTLNATGEEIIQQSSKTDASILQEKLGSLNLRWQEVCKQLSDRKKRLEEQKWQRKIDETLERLQELQEATDELDLKLRQAEVIKGSWQPVGDLLIDSLQDHLEKVKALRGEIAPLKENVSHVNDLARQLTTLGIQLSPYNLSTLEDLNTRWKLLQVAVEDRVRQLHEAHRDFGPASQHFLSTSVQGPWERAISPNKVPYYINHETQTTCWDHPKMTELYQSLADLNNVRFSAYRTAMKLRRLQKALCLDLLSLSAACDALDQHNLKQNDQPMDILQIINCLTTIYDRLEQEHNNLVNVPLCVDMCLNWLLNVYDTGRTGRIRVLSFKTGIISLCKAHLEDKYRYLFKQVASSTGFCDQRRLGLLLHDSIQIPRQLGEVASFGGSNIEPSVRSCFQFANNKPEIEAALFLDWMRLEPQSMVWLPVLHRVAAAETAKHQAKCNICKECPIIGFRYRSLKHFNYDICQSCFFSGRVAKGHKMHYPMVEYCTPTTSGEDVRDFAKVLKNKFRTKRYFAKHPRMGYLPVQTVLEGDNMETPVTLINFWPVDSAPASSPQLSHDDTHSRIEHYASRLAEMENSNGSYLNDSISPNESIDDEHLLIQHYCQSLNQDSPLSQPRSPAQILISLESEERGELERILADLEEENRNLQAEYDRLKQQHEHKGLSPLPSPPEMMPTSPQSPRDAELIAEAKLLRQHKGRLEARMQILEDHNKQLESQLHRLRQLLEQPQAEAKVNGTTVSSPSTSLQRSDSSQPMLLRVVGSQTSDSMGEEDLLSPPQDTSTGLEEVMEQLNNSFPSSRGRNTPGKPMREDTM

SEQ ID NO: 20 - protein, 1553 aa, synthetic construct
MLWWEEVEDCYEREDVQKKTFTKWVNAQFSKFGKQHIENLFSDLQDGRRLLDLLEGLTGQKLPKEKGSTRVHALNNVNKALRVLQNNNVDLVNIGSTDIVDGNHKLTLGLIWNIILHWQVKNVMKNIMAGLQQTNSEKILLSWVRQSTRNYPQVNVINFTTSWSDGLALNALIHSHRPDLFDWNSVVCQQSATQRLEHAFNIARYQLGIEKLLDPEDVDTTYPDKKSILMYITSLFQVLPQQVSIEAIQEVEMLPRPPKVTKEEHFQLHHQMHYSQQITVSLAQGYERTSSPKPRFKSYAYTQAAYVTTSDPTRSPFPSQHLEAPEDKSFGSSLMESEVNLDRYQTALEEVLSWLLSAEDTLQAQGEISNDVEVVKDQFHTHEGYMMDLTAHQGRVGNILQLGSKLIGTGKLSEDEETEVQEQMNLLNSRWECLRVASMEKQSNLHRVLMDLQNQKLKELNDWLTKTEERTRKMEEEPLGPDLEDLKRQVQQHKVLQEDLEQEQVRVNSLTHMVVVVDESSGDHATAALEEQLKVLGDRWANICRWTEDRWVLLQDHTVREETMMVMTEDMPLEISYVPSTYLTEITHVSQALLEVEQLLNAPDLCAKDFEDLFKQEESLKNIKDSLQQSSGRIDIIHSKKTAALQSATPVERVKLQEALSQLDFQWEKVNKMYKDRQGRFDRSVEKWRRFHYDIKIFNQWLTEAEQFLRKTQIPENWEHAKYKWYLKELQDGIGQRQTVVRTLNATGEEIIQQSSKTDASILQEKLGSLNLRWQEVCKQLSDRKKRLEEQKWQRKIDETLERLQELQEATDELDLKLRQAEVIKGSWQPVGDLLIDSLQDHLEKVKALRGEIAPLKENVSHVNDLARQLTTLGIQLSPYNLSTLEDLNTRWKLLQVAVEDRVRQLHEAHRDFGPASQHFLSTSVQGPWERAISPNKVPYYINHETQTTCWDHPKMTELYQSLADLNNVRFSAYRTAMKLRRLQKALCLDLLSLSAACDALDQHNLKQNDQPMDILQIINCLTTIYDRLEQEHNNLVNVPLCVDMCLNWLLNVYDTGRTGRIRVLSFKTGIISLCKAHLEDKYRYLFKQVASSTGFCDQRRLGLLLHDSIQIPRQLGEVASFGGSNIEPSVRSCFQFANNKPEIEAALFLDWMRLEPQSMVWLPVLHRVAAAETAKHQAKCNICKECPIIGFRYRSLKHFNYDICQSCFFSGRVAKGHKMHYPMVEYCTPTTSGEDVRDFAKVLKNKFRTKRYFAKHPRMGYLPVQTVLEGDNMETPVTLINFWPVDSAPASSPQLSHDDTHSRIEHYASRLAEMENSNGSYLNDSISPNESIDDEHLLIQHYCQSLNQDSPLSQPRSPAQILISLESEERGELERILADLEEENRNLQAEYDRLKQQHEHKGLSPLPSPPEMMPTSPQSPRDAELIAEAKLLRQHKGRLEARMQILEDHNKQLESQLHRLRQLLEQPQAEAKVNGTTVSSPSTSLQRSDSSQPMLLRVVGSQTSDSMGEEDLLSPPQDTSTGLEEVMEQLNNSFPSSRGRNTPGKPMREDTM

SEQ ID NO: 21 - protein, 1358 aa, synthetic construct
MLWWEEVEDCYEREDVQKKTFTKWVNAQFSKFGKQHIENLFSDLQDGRRLLDLLEGLTGQKLPKEKGSTRVHALNNVNKALRVLQNNNVDLVNIGSTDIVDGNHKLTLGLIWNIILHWQVKNVMKNIMAGLQQTNSEKILLSWVRQSTRNYPQVNVINFTTSWSDGLALNALIHSHRPDLFDWNSVVCQQSATQRLEHAFNIARYQLGIEKLLDPEDVDTTYPDKKSILMYITSLFQVLPQQVSIEAIQEVEMLPRPPKVTKEEHFQLHHQMHYSQQITVSLAQGYERTSSPKPRFKSYAYTQAAYVTTSDPTRSPFPSQHLEAPEDKSFGSSLMESEVNLDRYQTALEEVLSWLLSAEDTLQAQGEISNDVEVVKDQFHTHEGYMMDLTAHQGRVGNILQLGSKLIGTGKLSEDEETEVQEQMNLLNSRWECLRVASMEKQSNLHRVLMDLQNQKLKELNDWLTKTEERTRKMEEEPLGPDLEDLKRQVQQHKVLQEDLEQEQVRVNSLTHMVVVVDESSGDHATAALEEQLKVLGDRWANICRWTEDRWVLLQDHTVREETMMVMTEDMPLEISYVPSTYLTEITHVSQALLEVEQLLNAPDLCAKDFEDLFKQEESLKNIKDSLQQSSGRIDIIHSKKTAALQSATPVERVKLQEALSQLDFQWEKVNKMYKDRQGRFDRSVEKWRRFHYDIKIFNQWLTEAEQFLRKTQIPENWEHAKYKWYLKELQDGIGQRQTVVRTLNATGEEIIQQSSKTDASILQEKLGSLNLRWQEVCKQLSDRKKRLEEQKWQRKIDETLERLQELQEATDELDLKLRQAEVIKGSWQPVGDLLIDSLQDHLEKVKALRGEIAPLKENVSHVNDLARQLTTLGIQLSPYNLSTLEDLNTRWKLLQVAVEDRVRQLHEAHRDFGPASQHFLSTSVQGPWERAISPNKVPYYINHETQTTCWDHPKMTELYQSLADLNNVRFSAYRTAMKLRRLQKALCLDLLSLSAACDALDQHNLKQNDQPMDILQIINCLTTIYDRLEQEHNNLVNVPLCVDMCLNWLLNVYDTGRTGRIRVLSFKTGIISLCKAHLEDKYRYLFKQVASSTGFCDQRRLGLLLHDSIQIPRQLGEVASFGGSNIEPSVRSCFQFANNKPEIEAALFLDWMRLEPQSMVWLPVLHRVAAAETAKHQAKCNICKECPIIGFRYRSLKHFNYDICQSCFFSGRVAKGHKMHYPMVEYCTPTTSGEDVRDFAKVLKNKFRTKRYFAKHPRMGYLPVQTVLEGDNMETPVTLINFWPVDSAPASSPQLSHDDTHSRIEHYASRLAEMENSNGSYLNDSISPNESIDDEHLLIQHYCQSLNQDSPLSQPRS

SEQ ID NO: 22 - DNA, 3831 bp, synthetic construct
  source 1..3831: mol_type = other DNA
atgctttggtgggaagaagtagaggactgttatgaaagagaagatgttcaaaagaaaacattcacaaaatgggtaaatgcacaattttctaagtttgggaagcagcatattgagaacctcttcagtgacctacaggatgggaggcgcctcctagacctcctcgaaggcctgacagggcaaaaactgccaaaagaaaaaggatccacaagagttcatgccctgaacaatgtcaacaaggcactgcgggttttgcagaacaataatgttgatttagtgaatattggaagtactgacatcgtagatggaaatcataaactgactcttggtttgatttggaatataatcctccactggcaggtcaaaaatgtaatgaaaaatatcatggctggattgcaacaaaccaacagtgaaaagattctcctgagctgggtccgacaatcaactcgtaattatccacaggttaatgtaatcaacttcaccaccagctggtctgatggcctggctttgaatgctctcatccatagtcataggccagacctatttgactggaatagtgtggtttgccagcagtcagccacacaacgactggaacatgcattcaacatcgccagatatcaattaggcatagagaaactactcgatcctgaagatgttgataccacctatccagataagaagtccatcttaatgtacatcacatcactcttccaagttttgcctcaacaagtgagcattgaagccatccaggaagtggaaatgttgccaaggccacctaaagtgactaaagaagaacattttcagttacatcatcaaatgcactattctcaacagatcacggtcagtctagcacagggatatgagagaacttcttcccctaagcctcgattcaagagctatgcctacacacaggctgcttatgtcaccacctctgaccctacacggagcccatttccttcacagcatttggaagctcctgaagacaagtcatttggcagttcattgatggagagtgaagtaaacctggaccgttatcaaacagctttagaagaagtattatcgtggcttctttctgctgaggacacattgcaagcacaaggagagatttctaatgatgtggaagtggtgaaagaccagtttcatactcatgaggggtacatgatggatttgacagcccatcagggccgggttggtaatattctacaattgggaagtaagctgattggaacaggaaaattatcagaagatgaagaaactgaagtacaagagcagatgaatctcctaaattcaagatgggaatgcctcagggtagctagcatggaaaaacaaagcaatttacatagagttttaatggatctccagaatcagaaactgaaagagttgaatgactggctaacaaaaacagaagaaagaacaaggaaaatggaggaagagcctcttggacctgatcttgaagacctaaaacgccaagtacaacaacataaggtgcttcaagaagatctagaacaagaacaagtcagggtcaattctctcactcacatggtggtggtagttgatgaatctagtggagatcacgcaactgctgctttggaagaacaacttaaggtattgggagatcgatgggcaaacatctgtagatggacagaagaccgctgggttcttttacaagaccacactgtccgtgaagaaacgatgatggtgatgactgaagacatgcctttggaaatttcttatgtgccttctacttatttgactgaaatcactcatgtctcacaagccctattagaagtggaacaacttctcaatgctcctgacctctgtgctaaggactttgaagatctctttaagcaagaggagtctctgaagaatataaaagatagtctacaacaaagctcaggtcggattgacattattcatagcaagaagacagcagcattgcaaagtgcaacgcctgtggaaagggtgaagctacaggaagctctctcccagcttgatttccaatgggaaaaagttaacaaaatgtacaaggaccgacaagggcgatttgacagatctgttgagaaatggcggcgttttcattatgatataaagatatttaatcagtggctaacagaagctgaacagtttctcagaaagacacaaattcctgagaattgggaacatgctaaatacaaatggtatcttaaggaactccaggatggcattgggcagcggcaaactgttgtcagaacattgaatgcaactggggaagaaataattcagcaatcctcaaaaacagatgccagtattctacaggaaaaattgggaagcctgaatctgcggtggcaggaggtctgcaaacagctgtcagacagaaaaaagaggctagaagaacaaaagtggcagagaaaaatagatgagacccttgaaagactccgggaacttcaagaggccacggatgagctggacctcaagctgcgccaagctgaggtgatcaagggatcctggcagcccgtgggcgatctcctcattgactctctccaagatcacctcgagaaagtcaaggcacttcgaggagaaattgcgcctctgaaagagaacgtgagccacgtcaatgaccttgctcgccagcttaccactttgggcattcagctctcaccgtataacctcagcactctggaagacctgaacaccagatggaagcttctgcaggtggccgtcgaggaccgagtcaggcagctgcatgaagcccacagggactttggtccagcatctcagcactttctttccacgtctgtccagggtccctgggagagagccatctcgccaaacaaagtgccctactatatcaaccacgagactcaaacaacttgctgggaccatcccaaaatgacagagctctaccagtctttagctgacctgaataatgtcagattctcagcttataggactgccatgaaactccgaagactgcagaaggccctttgcttggatctcttgagcctgtcagctgcatgtgatgccttggaccagcacaacctcaagcaaaatgaccagcccatggatatcctgcagattattaattgtttgaccactatttatgaccgcctggagcaagagcacaacaatttggtcaacgtccctctctgcgtggatatgtgtctgaactggctgctgaatgtttatgatacgggacgaacagggaggatccgtgtcctgtcttttaaaactggcatcatttccctgtgtaaagcacatttggaagacaagtacagataccttttcaagcaagtggcaagttcaacaggattttgtgaccagcgcaggctgggcctccttctgcatgattctatccaaattccaagacagttgggtgaagttgcatcctttgggggcagtaacattgagccaagtgtccggagctgcttccaatttgctaataataagccagagatcgaagcggccctcttcctagactggatgagactggaaccccagtccatggtgtggctgcccgtcctgcacagagtggctgctgcagaaactgccaagcatcaggccaaatgtaacatctgcaaagagtgtccaatcattggattcaggtacaggagtctaaagcactttaattatgacatctgccaaagctgctttttttctggtcgagttgcaaaaggccataaaatgcactatcccatggtggaatattgcactccgactacatcaggagaagatgttcgagactttgccaaggtactaaaaaacaaatttcgaaccaaaaggtattttgcgaagcatccccgaatgggctacctgccagtgcagactgtcttagagggggacaacatggaaactccc

SEQ ID NO: 23 - DNA, 3711 bp, synthetic construct
  source 1..3711: mol_type = other DNA
atgctttggtgggaagaagtagaggactgttatgaaagagaagatgttcaaaagaaaacattcacaaaatgggtaaatgcacaattttctaagtttgggaagcagcatattgagaacctcttcagtgacctacaggatgggaggcgcctcctagacctcctcgaaggcctgacagggcaaaaactgccaaaagaaaaaggatccacaagagttcatgccctgaacaatgtcaacaaggcactgcgggttttgcagaacaataatgttgatttagtgaatattggaagtactgacatcgtagatggaaatcataaactgactcttggtttgatttggaatataatcctccactggcaggtcaaaaatgtaatgaaaaatatcatggctggattgcaacaaaccaacagtgaaaagattctcctgagctgggtccgacaatcaactcgtaattatccacaggttaatgtaatcaacttcaccaccagctggtctgatggcctggctttgaatgctctcatccatagtcataggccagacctatttgactggaatagtgtggtttgccagcagtcagccacacaacgactggaacatgcattcaacatcgccagatatcaattaggcatagagaaactactcgatcctgaagatgttgataccacctatccagataagaagtccatcttaatgtacatcacatcactcttccaagttttgcctcaacaagtgagcattgaagccatccaggaagtggaaatgttgccaaggccacctaaagtgactaaagaagaacattttcagttacatcatcaaatgcactattctcaacagatcacggtcagtctagcacagggatatgagagaacttcttcccctaagcctcgattcaagagctatgcctacacacaggctgcttatgtcaccacctctgaccctacacggagcccatttccttcacagcatttggaagctcctgaagacaagtcatttggcagttcattgatggagagtgaagtaaacctggaccgttatcaaacagctttagaagaagtattatcgtggcttctttctgctgaggacacattgcaagcacaaggagagatttctaatgatgtggaagtggtgaaagaccagtttcatactcatgaggggtacatgatggatttgacagcccatcagggccgggttggtaatattctacaattgggaagtaagctgattggaacaggaaaattatcagaagatgaagaaactgaagtacaagagcagatgaatctcctaaattcaagatgggaatgcctcagggtagctagcatggaaaaacaaagcaatttacatagagttttaatggatctccagaatcagaaactgaaagagttgaatgactggctaacaaaaacagaagaaagaacaaggaaaatggaggaagagcctcttggacctgatcttgaagacctaaaacgccaagtacaacaacataaggtgcttcaagaagatctagaacaagaacaagtcagggtcaattctctcactcacatggtggtggtagttgatgaatctagtggagatcacgcaactgctgctttggaagaacaacttaaggtattgggagatcgatgggcaaacatctgtagatggacagaagaccgctgggttcttttacaagaccacactgtccgtgaagaaacgatgatggtgatgactgaagacatgcctttggaaatttcttatgtgccttctacttatttgactgaaatcactcatgtctcacaagccctattagaagtggaacaacttctcaatgctcctgacctctgtgctaaggactttgaagatctctttaagcaagaggagtctctgaagaatataaaagatagtctacaacaaagctcaggtcggattgacattattcatagcaagaagacagcagcattgcaaagtgcaacgcctgtggaaagggtgaagctacaggaagctctctcccagcttgatttccaatgggaaaaagttaacaaaatgtacaaggaccgacaagggcgatttgacagatctgttgagaaatggcggcgttttcattatgatataaagatatttaatcagtggctaacagaagctgaacagtttctcagaaagacacaaattcctgagaattgggaacatgctaaatacaaatggtatcttaaggaactccaggatggcattgggcagcggcaaactgttgtcagaacattgaatgcaactggggaagaaataattcagcaatcctcaaaaacagatgccagtattctacaggaaaaattgggaagcctgaatctgcggtggcaggaggtctgcaaacagctgtcagacagaaaaaagaggctagaagaacaaaagggtccagcatctcagcactttctttccacgtctgtccagggtccctgggagagagccatctcgccaaacaaagtgccctactatatcaaccacgagactcaaacaacttgctgggaccatcccaaaatgacagagctctaccagtctttagctgacctgaataatgtcagattctcagcttataggactgccatgaaactccgaagactgcagaaggccctttgcttggatctcttgagcctgtcagctgcatgtgatgccttggaccagcacaacctcaagcaaaatgaccagcccatggatatcctgcagattattaattgtttgaccactatttatgaccgcctggagcaagagcacaacaatttggtcaacgtccctctctgcgtggatatgtgtctgaactggctgctgaatgtttatgatacgggacgaacagggaggatccgtgtcctgtcttttaaaactggcatcatttccctgtgtaaagcacatttggaagacaagtacagataccttttcaagcaagtggcaagttcaacaggattttgtgaccagcgcaggctgggcctccttctgcatgattctatccaaattccaagacagttgggtgaagttgcatcctttgggggcagtaacattgagccaagtgtccggagctgcttccaatttgctaataataagccagagatcgaagcggccctcttcctagactggatgagactggaaccccagtccatggtgtggctgcccgtcctgcacagagtggctgctgcagaaactgccaagcatcaggccaaatgtaacatctgcaaagagtgtccaatcattggattcaggtacaggagtctaaagcactttaattatgacatctgccaaagctgctttttttctggtcgagttgcaaaaggccataaaatgcactatcccatggtggaatattgcactccgactacatcaggagaagatgttcgagactttgccaaggtactaaaaaacaaatttcgaaccaaaaggtattttgcgaagcatccccgaatgggctacctgccagtgcagactgtcttagagggggacaacatggaaactcccgttactctgatcaacttctggccagtagattctgcgcctgcctcgtcccctcagctttcacacgatgatactcattcacgcattgaacattatgctagcaggctagcagaaatggaaaacagcaatggatcttatctaaatgatagcatctctcctaatgagagcatagatgatgaacatttgttaatccagcattactgccaaagtttgaaccaggactcccccctgagccagcctcgtagt

SEQ ID NO: 24 - DNA, 3900 bp, synthetic construct
  source 1..3900: mol_type = other DNA
atgctttggtgggaagaagtagaggactgttatgaaagagaagatgttcaaaagaaaacattcacaaaatgggtaaatgcacaattttctaagtttgggaagcagcatattgagaacctcttcagtgacctacaggatgggaggcgcctcctagacctcctcgaaggcctgacagggcaaaaactgccaaaagaaaaaggatccacaagagttcatgccctgaacaatgtcaacaaggcactgcgggttttgcagaacaataatgttgatttagtgaatattggaagtactgacatcgtagatggaaatcataaactgactcttggtttgatttggaatataatcctccactggcaggtcaaaaatgtaatgaaaaatatcatggctggattgcaacaaaccaacagtgaaaagattctcctgagctgggtccgacaatcaactcgtaattatccacaggttaatgtaatcaacttcaccaccagctggtctgatggcctggctttgaatgctctcatccatagtcataggccagacctatttgactggaatagtgtggtttgccagcagtcagccacacaacgactggaacatgcattcaacatcgccagatatcaattaggcatagagaaactactcgatcctgaagatgttgataccacctatccagataagaagtccatcttaatgtacatcacatcactcttccaagttttgcctcaacaagtgagcattgaagccatccaggaagtggaaatgttgccaaggccacctaaagtgactaaagaagaacattttcagttacatcatcaaatgcactattctcaacagatcacggtcagtctagcacagggatatgagagaacttcttcccctaagcctcgattcaagagctatgcctacacacaggctgcttatgtcaccacctctgaccctacacggagcccatttccttcacagcatttggaagctcctgaagacaagtcatttggcagttcattgatggagagtgaagtaaacctggaccgttatcaaacagctttagaagaagtattatcgtggcttctttctgctgaggacacattgcaagcacaaggagagatttctaatgatgtggaagtggtgaaagaccagtttcatactcatgaggggtacatgatggatttgacagcccatcagggccgggttggtaatattctacaattgggaagtaagctgattggaacaggaaaattatcagaagatgaagaaactgaagtacaagagcagatgaatctcctaaattcaagatgggaatgcctcagggtagctagcatggaaaaacaaagcaatttacatagagttttaatggatctccagaatcagaaactgaaagagttgaatgactggctaacaaaaacagaagaaagaacaaggaaaatggaggaagagcctcttggacctgatcttgaagacctaaaacgccaagtacaacaacataaggtgcttcaagaagatctagaacaagaacaagtcagggtcaattctctcactcacatggtggtggtagttgatgaatctagtggagatcacgcaactgctgctttggaagaacaacttaaggtattgggagatcgatgggcaaacatctgtagatggacagaagaccgctgggttcttttacaagaccacactgtccgtgaagaaacgatgatggtgatgactgaagacatgcctttggaaatttcttatgtgccttctacttatttgactgaaatcactcatgtctcacaagccctattagaagtggaacaacttctcaatgctcctgacctctgtgctaaggactttgaagatctctttaagcaagaggagtctctgaagaatataaaagatagtctacaacaaagctcaggtcggattgacattattcatagcaagaagacagcagcattgcaaagtgcaacgcctgtggaaagggtgaagctacaggaagctctctcccagcttgatttccaatgggaaaaagttaacaaaatgtacaaggaccgacaagggcgatttgacagatctgttgagaaatggcggcgttttcattatgatataaagatatttaatcagtggctaacagaagctgaacagtttctcagaaagacacaaattcctgagaattgggaacatgctaaatacaaatggtatcttaaggaactccaggatggcattgggcagcggcaaactgttgtcagaacattgaatgcaactggggaagaaataattcagcaatcctcaaaaacagatgccagtattctacaggaaaaattgggaagcctgaatctgcggtggcaggaggtctgcaaacagctgtcagacagaaaaaagaggctagaagaacaaaagggtccagcatctcagcactttctttccacgtctgtccagggtccctgggagagagccatctcgccaaacaaagtgccctactatatcaaccacgagactcaaacaacttgctgggaccatcccaaaatgacagagctctaccagtctttagctgacctgaataatgtcagattctcagcttataggactgccatgaaactccgaagactgcagaaggccctttgcttggatctcttgagcctgtcagctgcatgtgatgccttggaccagcacaacctcaagcaaaatgaccagcccatggatatcctgcagattattaattgtttgaccactatttatgaccgcctggagcaagagcacaacaatttggtcaacgtccctctctgcgtggatatgtgtctgaactggctgctgaatgtttatgatacgggacgaacagggaggatccgtgtcctgtcttttaaaactggcatcatttccctgtgtaaagcacatttggaagacaagtacagataccttttcaagcaagtggcaagttcaacaggattttgtgaccagcgcaggctgggcctccttctgcatgattctatccaaattccaagacagttgggtgaagttgcatcctttgggggcagtaacattgagccaagtgtccggagctgcttccaatttgctaataataagccagagatcgaagcggccctcttcctagactggatgagactggaaccccagtccatggtgtggctgcccgtcctgcacagagtggctgctgcagaaactgccaagcatcaggccaaatgtaacatctgcaaagagtgtccaatcattggattcaggtacaggagtctaaagcactttaattatgacatctgccaaagctgctttttttctggtcgagttgcaaaaggccataaaatgcactatcccatggtggaatattgcactccgactacatcaggagaagatgttcgagactttgccaaggtactaaaaaacaaatttcgaaccaaaaggtattttgcgaagcatccccgaatgggctacctgccagtgcagactgtcttagagggggacaacatggaaactcccgttactctgatcaacttctggccagtagattctgcgcctgcctcgtcccctcagctttcacacgatgatactcattcacgcattgaacattatgctagcaggctagcagaaatggaaaacagcaatggatcttatctaaatgatagcatctctcctaatgagagcatagatgatgaacatttgttaatccagcattactgccaaagtttgaaccaggactcccccctgagccagcctcgtagtcctgcccagatcttgatttccttagagagtgaggaaagaggggagctagagagaatcctagcagatcttgaggaagaaaacaggaatctgcaagcagaatatgaccgtctaaagcagcagcacgaacataaaggcctgtccccactgccgtcccctcctgaaatgatgcccacctctccccagagtccc

SEQ ID NO: 25 - DNA, 4263 bp, synthetic construct
  source 1..4263: mol_type = other DNA
atgctttggtgggaagaagtagaggactgttatgaaagagaagatgttcaaaagaaaacattcacaaaatgggtaaatgcacaattttctaagtttgggaagcagcatattgagaacctcttcagtgacctacaggatgggaggcgcctcctagacctcctcgaaggcctgacagggcaaaaactgccaaaagaaaaaggatccacaagagttcatgccctgaacaatgtcaacaaggcactgcgggttttgcagaacaataatgttgatttagtgaatattggaagtactgacatcgtagatggaaatcataaactgactcttggtttgatttggaatataatcctccactggcaggtcaaaaatgtaatgaaaaatatcatggctggattgcaacaaaccaacagtgaaaagattctcctgagctgggtccgacaatcaactcgtaattatccacaggttaatgtaatcaacttcaccaccagctggtctgatggcctggctttgaatgctctcatccatagtcataggccagacctatttgactggaatagtgtggtttgccagcagtcagccacacaacgactggaacatgcattcaacatcgccagatatcaattaggcatagagaaactactcgatcctgaagatgttgataccacctatccagataagaagtccatcttaatgtacatcacatcactcttccaagttttgcctcaacaagtgagcattgaagccatccaggaagtggaaatgttgccaaggccacctaaagtgactaaagaagaacattttcagttacatcatcaaatgcactattctcaacagatcacggtcagtctagcacagggatatgagagaacttcttcccctaagcctcgattcaagagctatgcctacacacaggctgcttatgtcaccacctctgaccctacacggagcccatttccttcacagcatttggaagctcctgaagacaagtcatttggcagttcattgatggagagtgaagtaaacctggaccgttatcaaacagctttagaagaagtattatcgtggcttctttctgctgaggacacattgcaagcacaaggagagatttctaatgatgtggaagtggtgaaagaccagtttcatactcatgaggggtacatgatggatttgacagcccatcagggccgggttggtaatattctacaattgggaagtaagctgattggaacaggaaaattatcagaagatgaagaaactgaagtacaagagcagatgaatctcctaaattcaagatgggaatgcctcagggtagctagcatggaaaaacaaagcaatttacatagagttttaatggatctccagaatcagaaactgaaagagttgaatgactggctaacaaaaacagaagaaagaacaaggaaaatggaggaagagcctcttggacctgatcttgaagacctaaaacgccaagtacaacaacataaggtgcttcaagaagatctagaacaagaacaagtcagggtcaattctctcactcacatggtggtggtagttgatgaatctagtggagatcacgcaactgctgctttggaagaacaacttaaggtattgggagatcgatgggcaaacatctgtagatggacagaagaccgctgggttcttttacaagaccacactgtccgtgaagaaacgatgatggtgatgactgaagacatgcctttggaaatttcttatgtgccttctacttatttgactgaaatcactcatgtctcacaagccctattagaagtggaacaacttctcaatgctcctgacctctgtgctaaggactttgaagatctctttaagcaagaggagtctctgaagaatataaaagatagtctacaacaaagctcaggtcggattgacattattcatagcaagaagacagcagcattgcaaagtgcaacgcctgtggaaagggtgaagctacaggaagctctctcccagcttgatttccaatgggaaaaagttaacaaaatgtacaaggaccgacaagggcgatttgacagatctgttgagaaatggcggcgttttcattatgatataaagatatttaatcagtggctaacagaagctgaacagtttctcagaaagacacaaattcctgagaattgggaacatgctaaatacaaatggtatcttaaggaactccaggatggcattgggcagcggcaaactgttgtcagaacattgaatgcaactggggaagaaataattcagcaatcctcaaaaacagatgccagtattctacaggaaaaattgggaagcctgaatctgcggtggcaggaggtctgcaaacagctgtcagacagaaaaaagaggctagaagaacaaaagtggcagagaaaaatagatgagacccttgaaagactccgggaacttcaagaggccacggatgagctggacctcaagctgcgccaagctgaggtgatcaagggatcctggcagcccgtgggcgatctcctcattgactctctccaagatcacctcgagaaagtcaaggcacttcgaggagaaattgcgcctctgaaagagaacgtgagccacgtcaatgaccttgctcgccagcttaccactttgggcattcagctctcaccgtataacctcagcactctggaagacctgaacaccagatggaagcttctgcaggtggccgtcgaggaccgagtcaggcagctgcatgaagcccacagggactttggtccagcatctcagcactttctttccacgtctgtccagggtccctgggagagagccatctcgccaaacaaagtgccctactatatcaaccacgagactcaaacaacttgctgggaccatcccaaaatgacagagctctaccagtctttagctgacctgaataatgtcagattctcagcttataggactgccatgaaactccgaagactgcagaaggccctttgcttggatctcttgagcctgtcagctgcatgtgatgccttggaccagcacaacctcaagcaaaatgaccagcccatggatatcctgcagattattaattgtttgaccactatttatgaccgcctggagcaagagcacaacaatttggtcaacgtccctctctgcgtggatatgtgtctgaactggctgctgaatgtttatgatacgggacgaacagggaggatccgtgtcctgtcttttaaaactggcatcatttccctgtgtaaagcacatttggaagacaagtacagataccttttcaagcaagtggcaagttcaacaggattttgtgaccagcgcaggctgggcctccttctgcatgattctatccaaattccaagacagttgggtgaagttgcatcctttgggggcagtaacattgagccaagtgtccggagctgcttccaatttgctaataataagccagagatcgaagcggccctcttcctagactggatgagactggaaccccagtccatggtgtggctgcccgtcctgcacagagtggctgctgcagaaactgccaagcatcaggccaaatgtaacatctgcaaagagtgtccaatcattggattcaggtacaggagtctaaagcactttaattatgacatctgccaaagctgctttttttctggtcgagttgcaaaaggccataaaatgcactatcccatggtggaatattgcactccgactacatcaggagaagatgttcgagactttgccaaggtactaaaaaacaaatttcgaaccaaaaggtattttgcgaagcatccccgaatgggctacctgccagtgcagactgtcttagagggggacaacatggaaactcccgttactctgatcaacttctggccagtagattctgcgcctgcctcgtcccctcagctttcacacgatgatactcattcacgcattgaacattatgctagcaggctagcagaaatggaaaacagcaatggatcttatctaaatgatagcatctctcctaatgagagcatagatgatgaacatttgttaatccagcattactgccaaagtttgaaccaggactcccccctgagccagcctcgtagtcctgcccagatcttgatttccttagagagtgaggaaagaggggagctagagagaatcctagcagatcttgaggaagaaaacaggaatctgcaagcagaatatgaccgtctaaagcagcagcacgaacataaaggcctgtccccactgccgtcccctcctgaaatgatgcccacctctccccagagtccc

SEQ ID NO: 26 - DNA, 4293 bp, synthetic construct
  source 1..4293: mol_type = other DNA
atgctttggtgggaagaagtagaggactgttatgaaagagaagatgttcaaaagaaaacattcacaaaatgggtaaatgcacaattttctaagtttgggaagcagcatattgagaacctcttcagtgacctacaggatgggaggcgcctcctagacctcctcgaaggcctgacagggcaaaaactgccaaaagaaaaaggatccacaagagttcatgccctgaacaatgtcaacaaggcactgcgggttttgcagaacaataatgttgatttagtgaatattggaagtactgacatcgtagatggaaatcataaactgactcttggtttgatttggaatataatcctccactggcaggtcaaaaatgtaatgaaaaatatcatggctggattgcaacaaaccaacagtgaaaagattctcctgagctgggtccgacaatcaactcgtaattatccacaggttaatgtaatcaacttcaccaccagctggtctgatggcctggctttgaatgctctcatccatagtcataggccagacctatttgactggaatagtgtggtttgccagcagtcagccacacaacgactggaacatgcattcaacatcgccagatatcaattaggcatagagaaactactcgatcctgaagatgttgataccacctatccagataagaagtccatcttaatgtacatcacatcactcttccaagttttgcctcaacaagtgagcattgaagccatccaggaagtggaaatgttgccaaggccacctaaagtgactaaagaagaacattttcagttacatcatcaaatgcactattctcaacagatcacggtcagtctagcacagggatatgagagaacttcttcccctaagcctcgattcaagagctatgcctacacacaggctgcttatgtcaccacctctgaccctacacggagcccatttccttcacagcatttggaagctcctgaagacaagtcatttggcagttcattgatggagagtgaagtaaacctggaccgttatcaaacagctttagaagaagtattatcgtggcttctttctgctgaggacacattgcaagcacaaggagagatttctaatgatgtggaagtggtgaaagaccagtttcatactcatgaggggtacatgatggatttgacagcccatcagggccgggttggtaatattctacaattgggaagtaagctgattggaacaggaaaattatcagaagatgaagaaactgaagtacaagagcagatgaatctcctaaattcaagatgggaatgcctcagggtagctagcatggaaaaacaaagcaatttacatagagttttaatggatctccagaatcagaaactgaaagagttgaatgactggctaacaaaaacagaagaaagaacaaggaaaatggaggaagagcctcttggacctgatcttgaagacctaaaacgccaagtacaacaacataaggtgcttcaagaagatctagaacaagaacaagtcagggtcaattctctcactcacatggtggtggtagttgatgaatctagtggagatcacgcaactgctgctttggaagaacaacttaaggtattgggagatcgatgggcaaacatctgtagatggacagaagaccgctgggttcttttacaagaccacctttctctgcaggaacttctggtgtggctacagctgaaagatgatgaattaagccggcaggcacctattggaggcgactttccagcagttcagaagcagaacgatgtacatagggccttcaagagggaattgaaaactaaagaacctgtaatcatgagtactcttgagactgtacgaatatttctgacagagcagcctttggaaggactagagaaactctaccaggagcccagagagctgcctcctgaggagagagcccagaatgtcactcggcttctacgaaagcaggctgaggaggtcaatactgagtgggaaaaattgaacctgcactccgctgactggcagagaaaaatagatgagacccttgaaagactccgggaacttcaagaggccacggatgagctggacctcaagctgcgccaagctgaggtgatcaagggatcctggcagcccgtgggcgatctcctcattgactctctccaagatcacctcgagaaagtcaaggcacttcgaggagaaattgcgcctctgaaagagaacgtgagccacgtcaatgaccttgctcgccagcttaccactttgggcattcagctctcaccgtataacctcagcactctggaagacctgaacaccagatggaagcttctgcaggtggccgtcgaggaccgagtcaggcagctgcatgaagcccacagggactttggtccagcatctcagcactttctttccacgtctgtccagggtccctgggagagagccatctcgccaaacaaagtgccctactatatcaaccacgagactcaaacaacttgctgggaccatcccaaaatgacagagctctaccagtctttagctgacctgaataatgtcagattctcagcttataggactgccatgaaactccgaagactgcagaaggccctttgcttggatctcttgagcctgtcagctgcatgtgatgccttggaccagcacaacctcaagcaaaatgaccagcccatggatatcctgcagattattaattgtttgaccactatttatgaccgcctggagcaagagcacaacaatttggtcaacgtccctctctgcgtggatatgtgtctgaactggctgctgaatgtttatgatacgggacgaacagggaggatccgtgtcctgtcttttaaaactggcatcatttccctgtgtaaagcacatttggaagacaagtacagataccttttcaagcaagtggcaagttcaacaggattttgtgaccagcgcaggctgggcctccttctgcatgattctatccaaattccaagacagttgggtgaagttgcatcctttgggggcagtaacattgagccaagtgtccggagctgcttccaatttgctaataataagccagagatcgaagcggccctcttcctagactggatgagactggaaccccagtccatggtgtggctgcccgtcctgcacagagtggctgctgcagaaactgccaagcatcaggccaaatgtaacatctgcaaagagtgtccaatcattggattcaggtacaggagtctaaagcactttaattatgacatctgccaaagctgctttttttctggtcgagttgcaaaaggccataaaatgcactatcccatggtggaatattgcactccgactacatcaggagaagatgttcgagactttgccaaggtactaaaaaacaaatttcgaaccaaaaggtattttgcgaagcatccccgaatgggctacctgccagtgcagactgtcttagagggggacaacatggaaactcccgttactctgatcaacttctggccagtagattctgcgcctgcctcgtcccctcagctttcacacgatgatactcattcacgcattgaacattatgctagcaggctagcagaaatggaaaacagcaatggatcttatctaaatgatagcatctctcctaatgagagcatagatgatgaacatttgttaatccagcattactgccaaagtttgaaccaggactcccccctgagccagcctcgtagtcctgcccagatcttgatttccttagagagtgaggaaagaggggagctagagagaatcctagcagatcttgaggaagaaaacaggaatctgcaagcagaatatgaccgtctaaagcagcagcacgaacataaaggcctgtccccactgccgtcccctcctgaaatgatgcccacctctccccagagtccccgggatgctgagctcattgctgaggccaagctactgcgtcaacacaaaggccgcctggaagccaggatgcaaatcctggaagaccacaataaacagctggagtcacagttacacaggctaaggcagctgctggagcaaccccaggcagaggccaaagtgaatggcacaacggtgtcctctccttctacctctctacagaggtccgacagcagtcagcctatgctgctccgagtggttggcagtcaaacttcggactccatgggtgaggaagatcttctcagtcctccccaggacacaagcacagggttagaggaggtgatggagcaactcaacaactccttccctagttcaagaggaagaaatacccctggaaagccaatgagagaggacacaatg

SEQ ID NO: 27 - DNA, 4296 bp, synthetic construct
  source 1..4296: mol_type = other DNA
atgctttggtgggaagaagtagaggactgttatgaaagagaagatgttcaaaagaaaacattcacaaaatgggtaaatgcacaattttctaagtttgggaagcagcatattgagaacctcttcagtgacctacaggatgggaggcgcctcctagacctcctcgaaggcctgacagggcaaaaactgccaaaagaaaaaggatccacaagagttcatgccctgaacaatgtcaacaaggcactgcgggttttgcagaacaataatgttgatttagtgaatattggaagtactgacatcgtagatggaaatcataaactgactcttggtttgatttggaatataatcctccactggcaggtcaaaaatgtaatgaaaaatatcatggctggattgcaacaaaccaacagtgaaaagattctcctgagctgggtccgacaatcaactcgtaattatccacaggttaatgtaatcaacttcaccaccagctggtctgatggcctggctttgaatgctctcatccatagtcataggccagacctatttgactggaatagtgtggtttgccagcagtcagccacacaacgactggaacatgcattcaacatcgccagatatcaattaggcatagagaaactactcgatcctgaagatgttgataccacctatccagataagaagtccatcttaatgtacatcacatcactcttccaagttttgcctcaacaagtgagcattgaagccatccaggaagtggaaatgttgccaaggccacctaaagtgactaaagaagaacattttcagttacatcatcaaatgcactattctcaacagatcacggtcagtctagcacagggatatgagagaacttcttcccctaagcctcgattcaagagctatgcctacacacaggctgcttatgtcaccacctctgaccctacacggagcccatttccttcacagcatttggaagctcctgaagacaagtcatttggcagttcattgatggagagtgaagtaaacctggaccgttatcaaacagctttagaagaagtattatcgtggcttctttctgctgaggacacattgcaagcacaaggagagatttctaatgatgtggaagtggtgaaagaccagtttcatactcatgaggggtacatgatggatttgacagcccatcagggccgggttggtaatattctacaattgggaagtaagctgattggaacaggaaaattatcagaagatgaagaaactgaagtacaagagcagatgaatctcctaaattcaagatgggaatgcctcagggtagctagcatggaaaaacaaagcaatttacatagagttttaatggatctccagaatcagaaactgaaagagttgaatgactggctaacaaaaacagaagaaagaacaaggaaaatggaggaagagcctcttggacctgatcttgaagacctaaaacgccaagtacaacaacataaggtgcttcaagaagatctagaacaagaacaagtcagggtcaattctctcactcacatggtggtggtagttgatgaatctagtggagatcacgcaactgctgctttggaagaacaacttaaggtattgggagatcgatgggcaaacatctgtagatggacagaagaccgctgggttcttttacaagaccacactgtccgtgaagaaacgatgatggtgatgactgaagacatgcctttggaaatttcttatgtgccttctacttatttgactgaaatcactcatgtctcacaagccctattagaagtggaacaacttctcaatgctcctgacctctgtgctaaggactttgaagatctctttaagcaagaggagtctctgaagaatataaaagatagtctacaacaaagctcaggtcggattgacattattcatagcaagaagacagcagcattgcaaagtgcaacgcctgtggaaagggtgaagctacaggaagctctctcccagcttgatttccaatgggaaaaagttaacaaaatgtacaaggaccgacaagggcgatttgacagatctgttgagaaatggcggcgttttcattatgatataaagatatttaatcagtggctaacagaagctgaacagtttctcagaaagacacaaattcctgagaattgggaacatgctaaatacaaatggtatcttaaggaactccaggatggcattgggcagcggcaaactgttgtcagaacattgaatgcaactggggaagaaataattcagcaatcctcaaaaacagatgccagtattctacaggaaaaattgggaagcctgaatctgcggtggcaggaggtctgcaaacagctgtcagacagaaaaaagaggctagaagaacaaaagggtccagcatctcagcactttctttccacgtctgtccagggtccctgggagagagccatctcgccaaacaaagtgccctactatatcaaccacgagactcaaacaacttgctgggaccatcccaaaatgacagagctctaccagtctttagctgacctgaataatgtcagattctcagcttataggactgccatgaaactccgaagactgcagaaggccctttgcttggatctcttgagcctgtcagctgcatgtgatgccttggaccagcacaacctcaagcaaaatgaccagcccatggatatcctgcagattattaattgtttgaccactatttatgaccgcctggagcaagagcacaacaatttggtcaacgtccctctctgcgtggatatgtgtctgaactggctgctgaatgtttatgatacgggacgaacagggaggatccgtgtcctgtcttttaaaactggcatcatttccctgtgtaaagcacatttggaagacaagtacagataccttttcaagcaagtggcaagttcaacaggattttgtgaccagcgcaggctgggcctccttctgcatgattctatccaaattccaagacagttgggtgaagttgcatcctttgggggcagtaacattgagccaagtgtccggagctgcttccaatttgctaataataagccagagatcgaagcggccctcttcctagactggatgagactggaaccccagtccatggtgtggctgcccgtcctgcacagagtggctgctgcagaaactgccaagcatcaggccaaatgtaacatctgcaaagagtgtccaatcattggattcaggtacaggagtctaaagcactttaattatgacatctgccaaagctgctttttttctggtcgagttgcaaaaggccataaaatgcactatcccatggtggaatattgcactccgactacatcaggagaagatgttcgagactttgccaaggtactaaaaaacaaatttcgaaccaaaaggtattttgcgaagcatccccgaatgggctacctgccagtgcagactgtcttagagggggacaacatggaaactcccgttactctgatcaacttctggccagtagattctgcgcctgcctcgtcccctcagctttcacacgatgatactcattcacgcattgaacattatgctagcaggctagcagaaatggaaaacagcaatggatcttatctaaatgatagcatctctcctaatgagagcatagatgatgaacatttgttaatccagcattactgccaaagtttgaaccaggactcccccctgagccagcctcgtagtcctgcccagatcttgatttccttagagagtgaggaaagaggggagctagagagaatcctagcagatcttgaggaagaaaacaggaatctgcaagcagaatatgaccgtctaaagcagcagcacgaacataaaggcctgtccccactgccgtcccctcctgaaatgatgcccacctctccccagagtccccgggatgctgagctcattgctgaggccaagctactgcgtcaacacaaaggccgcctggaagccaggatgcaaatcctggaagaccacaataaacagctggagtcacagttacacaggctaaggcagctgctggagcaaccccaggcagaggccaaagtgaatggcacaacggtgtcctctccttctacctctctacagaggtccgacagcagtcagcctatgctgctccgagtggttggcagtcaaacttcggactccatgggtgaggaagatcttctcagtcctccccaggacacaagcacagggttagaggaggtgatggagcaactcaacaactccttccctagttcaagaggaagaaatacccctggaaagccaatgagagaggacacaatg

SEQ ID NO: 28 - DNA, 4344 bp, synthetic construct
  source 1..4344: mol_type = other DNA
atgctttggtgggaagaagtagaggactgttatgaaagagaagatgttcaaaagaaaacattcacaaaatgggtaaatgcacaattttctaagtttgggaagcagcatattgagaacctcttcagtgacctacaggatgggaggcgcctcctagacctcctcgaaggcctgacagggcaaaaactgccaaaagaaaaaggatccacaagagttcatgccctgaacaatgtcaacaaggcactgcgggttttgcagaacaataatgttgatttagtgaatattggaagtactgacatcgtagatggaaatcataaactgactcttggtttgatttggaatataatcctccactggcaggtcaaaaatgtaatgaaaaatatcatggctggattgcaacaaaccaacagtgaaaagattctcctgagctgggtccgacaatcaactcgtaattatccacaggttaatgtaatcaacttcaccaccagctggtctgatggcctggctttgaatgctctcatccatagtcataggccagacctatttgactggaatagtgtggtttgccagcagtcagccacacaacgactggaacatgcattcaacatcgccagatatcaattaggcatagagaaactactcgatcctgaagatgttgataccacctatccagataagaagtccatcttaatgtacatcacatcactcttccaagttttgcctcaacaagtgagcattgaagccatccaggaagtggaaatgttgccaaggccacctaaagtgactaaagaagaacattttcagttacatcatcaaatgcactattctcaacagatcacggtcagtctagcacagggatatgagagaacttcttcccctaagcctcgattcaagagctatgcctacacacaggctgcttatgtcaccacctctgaccctacacggagcccatttccttcacagcatttggaagctcctgaagacaagtcatttggcagttcattgatggagagtgaagtaaacctggaccgttatcaaacagctttagaagaagtattatcgtggcttctttctgctgaggacacattgcaagcacaaggagagatttctaatgatgtggaagtggtgaaagaccagtttcatactcatgaggggtacatgatggatttgacagcccatcagggccgggttggtaatattctacaattgggaagtaagctgattggaacaggaaaattatcagaagatgaagaaactgaagtacaagagcagatgaatctcctaaattcaagatgggaatgcctcagggtagctagcatggaaaaacaaagcaatttacatagagttttaatggatcacactgtccgtgaagaaacgatgatggtgatgactgaagacatgcctttggaaatttcttatgtgccttctacttatttgactgaaatcactcatgtctcacaagccctattagaagtggaacaacttctcaatgctcctgacctctgtgctaaggactttgaagatctctttaagcaagaggagtctctgaagaatataaaagatagtctacaacaaagctcaggtcggattgacattattcatagcaagaagacagcagcattgcaaagtgcaacgcctgtggaaagggtgaagctacaggaagctctctcccagcttgatttccaatgggaaaaagttaacaaaatgtacaaggaccgacaagggcgatttgacagatctgttgagaaatggcggcgttttcattatgatataaagatatttaatcagtggctaacagaagctgaacagtttctcagaaagacacaaattcctgagaattgggaacatgctaaatacaaatggtatcttaaggaactccaggatggcattgggcagcggcaaactgttgtcagaacattgaatgcaactggggaagaaataattcagcaatcctcaaaaacagatgccagtattctacaggaaaaattgggaagcctgaatctgcggtggcaggaggtctgcaaacagctgtcagacagaaaaaagaggctagaagaacaaaagtggcagagaaaaatagatgagacccttgaaagactccgggaacttcaagaggccacggatgagctggacctcaagctgcgccaagctgaggtgatcaagggatcctggcagcccgtgggcgatctcctcattgactctctccaagatcacctcgagaaagtcaaggcacttcgaggagaaattgcgcctctgaaagagaacgtgagccacgtcaatgaccttgctcgccagcttaccactttgggcattcagctctcaccgtataacctcagcactctggaagacctgaacaccagatggaagcttctgcaggtggccgtcgaggaccgagtcaggcagctgcatgaagcccacagggactttggtccagcatctcagcactttctttccacgtctgtccagggtccctgggagagagccatctcgccaaacaaagtgccctactatatcaaccacgagactcaaacaacttgctgggaccatcccaaaatgacagagctctaccagtctttagctgacctgaataatgtcagattctcagcttataggactgccatgaaactccgaagactgcagaaggccctttgcttggatctcttgagcctgtcagctgcatgtgatgccttggaccagcacaacctcaagcaaaatgaccagcccatggatatcctgcagattattaattgtttgaccactatttatgaccgcctggagcaagagcacaacaatttggtcaacgtccctctctgcgtggatatgtgtctgaactggctgctgaatgtttatgatacgggacgaacagggaggatccgtgtcctgtcttttaaaactggcatcatttccctgtgtaaagcacatttggaagacaagtacagataccttttcaagcaagtggcaagttcaacaggattttgtgaccagcgcaggctgggcctccttctgcatgattctatccaaattccaagacagttgggtgaagttgcatcctttgggggcagtaacattgagccaagtgtccggagctgcttccaatttgctaataataagccagagatcgaagcggccctcttcctagactggatgagactggaaccccagtccatggtgtggctgcccgtcctgcacagagtggctgctgcagaaactgccaagcatcaggccaaatgtaacatctgcaaagagtgtccaatcattggattcaggtacaggagtctaaagcactttaattatgacatctgccaaagctgctttttttctggtcgagttgcaaaaggccataaaatgcactatcccatggtggaatattgcactccgactacatcaggagaagatgttcgagactttgccaaggtactaaaaaacaaatttcgaaccaaaaggtattttgcgaagcatccccgaatgggctacctgccagtgcagactgtcttagagggggacaacatggaaactcccgttactctgatcaacttctggccagtagattctgcgcctgcctcgtcccctcagctttcacacgatgatactcattcacgcattgaacattatgctagcaggctagcagaaatggaaaacagcaatggatcttatctaaatgatagcatctctcctaatgagagcatagatgatgaacatttgttaatccagcattactgccaaagtttgaaccaggactcccccctgagccagcctcgtagtcctgcccagatcttgatttccttagagagtgaggaaagaggggagctagagagaatcctagcagatcttgaggaagaaaacaggaatctgcaagcagaatatgaccgtctaaagcagcagcacgaacataaaggcctgtccccactgccgtcccctcctgaaatgatgcccacctctccccagagtccccgggatgctgagctcattgctgaggccaagctactgcgtcaacacaaaggccgcctggaagccaggatgcaaatcctggaagaccacaataaacagctggagtcacagttacacaggctaaggcagctgctggagcaaccccaggcagaggccaaagtgaatggcacaacggtgtcctctccttctacctctctacagaggtccgacagcagtcagcctatgctgctccgagtggttggcagtcaaacttcggactccatgggtgaggaagatcttctcagtcctccccaggacacaagcacagggttagaggaggtgatggagcaactcaacaactccttccctagttcaagaggaagaaatacccctggaaagccaatgagagaggacacaatg

SEQ ID NO: 29 - DNA, 4659 bp, synthetic construct
  source 1..4659: mol_type = other DNA
atgctttggtgggaagaagtagaggactgttatgaaagagaagatgttcaaaagaaaacattcacaaaatgggtaaatgcacaattttctaagtttgggaagcagcatattgagaacctcttcagtgacctacaggatgggaggcgcctcctagacctcctcgaaggcctgacagggcaaaaactgccaaaagaaaaaggatccacaagagttcatgccctgaacaatgtcaacaaggcactgcgggttttgcagaacaataatgttgatttagtgaatattggaagtactgacatcgtagatggaaatcataaactgactcttggtttgatttggaatataatcctccactggcaggtcaaaaatgtaatgaaaaatatcatggctggattgcaacaaaccaacagtgaaaagattctcctgagctgggtccgacaatcaactcgtaattatccacaggttaatgtaatcaacttcaccaccagctggtctgatggcctggctttgaatgctctcatccatagtcataggccagacctatttgactggaatagtgtggtttgccagcagtcagccacacaacgactggaacatgcattcaacatcgccagatatcaattaggcatagagaaactactcgatcctgaagatgttgataccacctatccagataagaagtccatcttaatgtacatcacatcactcttccaagttttgcctcaacaagtgagcattgaagccatccaggaagtggaaatgttgccaaggccacctaaagtgactaaagaagaacattttcagttacatcatcaaatgcactattctcaacagatcacggtcagtctagcacagggatatgagagaacttcttcccctaagcctcgattcaagagctatgcctacacacaggctgcttatgtcaccacctctgaccctacacggagcccatttccttcacagcatttggaagctcctgaagacaagtcatttggcagttcattgatggagagtgaagtaaacctggaccgttatcaaacagctttagaagaagtattatcgtggcttctttctgctgaggacacattgcaagcacaaggagagatttctaatgatgtggaagtggtgaaagaccagtttcatactcatgaggggtacatgatggatttgacagcccatcagggccgggttggtaatattctacaattgggaagtaagctgattggaacaggaaaattatcagaagatgaagaaactgaagtacaagagcagatgaatctcctaaattcaagatgggaatgcctcagggtagctagcatggaaaaacaaagcaatttacatagagttttaatggatctccagaatcagaaactgaaagagttgaatgactggctaacaaaaacagaagaaagaacaaggaaaatggaggaagagcctcttggacctgatcttgaagacctaaaacgccaagtacaacaacataaggtgcttcaagaagatctagaacaagaacaagtcagggtcaattctctcactcacatggtggtggtagttgatgaatctagtggagatcacgcaactgctgctttggaagaacaacttaaggtattgggagatcgatgggcaaacatctgtagatggacagaagaccgctgggttcttttacaagaccacactgtccgtgaagaaacgatgatggtgatgactgaagacatgcctttggaaatttcttatgtgccttctacttatttgactgaaatcactcatgtctcacaagccctattagaagtggaacaacttctcaatgctcctgacctctgtgctaaggactttgaagatctctttaagcaagaggagtctctgaagaatataaaagatagtctacaacaaagctcaggtcggattgacattattcatagcaagaagacagcagcattgcaaagtgcaacgcctgtggaaagggtgaagctacaggaagctctctcccagcttgatttccaatgggaaaaagttaacaaaatgtacaaggaccgacaagggcgatttgacagatctgttgagaaatggcggcgttttcattatgatataaagatatttaatcagtggctaacagaagctgaacagtttctcagaaagacacaaattcctgagaattgggaacatgctaaatacaaatggtatcttaaggaactccaggatggcattgggcagcggcaaactgttgtcagaacattgaatgcaactggggaagaaataattcagcaatcctcaaaaacagatgccagtattctacaggaaaaattgggaagcctgaatctgcggtggcaggaggtctgcaaacagctgtcagacagaaaaaagaggctagaagaacaaaagtggcagagaaaaatagatgagacccttgaaagactccgggaacttcaagaggccacggatgagctggacctcaagctgcgccaagctgaggtgatcaagggatcctggcagcccgtgggcgatctcctcattgactctctccaagatcacctcgagaaagtcaaggcacttcgaggagaaattgcgcctctgaaagagaacgtgagccacgtcaatgaccttgctcgccagcttaccactttgggcattcagctctcaccgtataacctcagcactctggaagacctgaacaccagatggaagcttctgcaggtggccgtcgaggaccgagtcaggcagctgcatgaagcccacagggactttggtccagcatctcagcactttctttccacgtctgtccagggtccctgggagagagccatctcgccaaacaaagtgccctactatatcaaccacgagactcaaacaacttgctgggaccatcccaaaatgacagagctctaccagtctttagctgacctgaataatgtcagattctcagcttataggactgccatgaaactccgaagactgcagaaggccctttgcttggatctcttgagcctgtcagctgcatgtgatgccttggaccagcacaacctcaagcaaaatgaccagcccatggatatcctgcagattattaattgtttgaccactatttatgaccgcctggagcaagagcacaacaatttggtcaacgtccctctctgcgtggatatgtgtctgaactggctgctgaatgtttatgatacgggacgaacagggaggatccgtgtcctgtcttttaaaactggcatcatttccctgtgtaaagcacatttggaagacaagtacagataccttttcaagcaagtggcaagttcaacaggattttgtgaccagcgcaggctgggcctccttctgcatgattctatccaaattccaagacagttgggtgaagttgcatcctttgggggcagtaacattgagccaagtgtccggagctgcttccaatttgctaataataagccagagatcgaagcggccctcttcctagactggatgagactggaaccccagtccatggtgtggctgcccgtcctgcacagagtggctgctgcagaaactgccaagcatcaggccaaatgtaacatctgcaaagagtgtccaatcattggattcaggtacaggagtctaaagcactttaattatgacatctgccaaagctgctttttttctggtcgagttgcaaaaggccataaaatgcactatcccatggtggaatattgcactccgactacatcaggagaagatgttcgagactttgccaaggtactaaaaaacaaatttcgaaccaaaaggtattttgcgaagcatccccgaatgggctacctgccagtgcagactgtcttagagggggacaacatggaaactcccgttactctgatcaacttctggccagtagattctgcgcctgcctcgtcccctcagctttcacacgatgatactcattcacgcattgaacattatgctagcaggctagcagaaatggaaaacagcaatggatcttatctaaatgatagcatctctcctaatgagagcatagatgatgaacatttgttaatccagcattactgccaaagtttgaaccaggactcccccctgagccagcctcgtagtcctgcccagatcttgatttccttagagagtgaggaaagaggggagctagagagaatcctagcagatcttgaggaagaaaacaggaatctgcaagcagaatatgaccgtctaaagcagcagcacgaacataaaggcctgtccccactgccgtcccctcctgaaatgatgcccacctctccccagagtccccgggatgctgagctcattgctgaggccaagctactgcgtcaacacaaaggccgcctggaagccaggatgcaaatcctggaagaccacaataaacagctggagtcacagttacacaggctaaggcagctgctggagcaaccccaggcagaggccaaagtgaatggcacaacggtgtcctctccttctacctctctacagaggtccgacagcagtcagcctatgctgctccgagtggttggcagtcaaacttcggactccatgggtgaggaagatcttctcagtcctccccaggacacaagcacagggttagaggaggtgatggagcaactcaacaactccttccctagttcaagaggaagaaatacccctggaaagccaatgagagaggacacaatg

SEQ ID NO: 30 - DNA, 4074 bp, synthetic construct
  source 1..4074: mol_type = other DNA
atgctttggtgggaagaagtagaggactgttatgaaagagaagatgttcaaaagaaaacattcacaaaatgggtaaatgcacaattttctaagtttgggaagcagcatattgagaacctcttcagtgacctacaggatgggaggcgcctcctagacctcctcgaaggcctgacagggcaaaaactgccaaaagaaaaaggatccacaagagttcatgccctgaacaatgtcaacaaggcactgcgggttttgcagaacaataatgttgatttagtgaatattggaagtactgacatcgtagatggaaatcataaactgactcttggtttgatttggaatataatcctccactggcaggtcaaaaatgtaatgaaaaatatcatggctggattgcaacaaaccaacagtgaaaagattctcctgagctgggtccgacaatcaactcgtaattatccacaggttaatgtaatcaacttcaccaccagctggtctgatggcctggctttgaatgctctcatccatagtcataggccagacctatttgactggaatagtgtggtttgccagcagtcagccacacaacgactggaacatgcattcaacatcgccagatatcaattaggcatagagaaactactcgatcctgaagatgttgataccacctatccagataagaagtccatcttaatgtacatcacatcactcttccaagttttgcctcaacaagtgagcattgaagccatccaggaagtggaaatgttgccaaggccacctaaagtgactaaagaagaacattttcagttacatcatcaaatgcactattctcaacagatcacggtcagtctagcacagggatatgagagaacttcttcccctaagcctcgattcaagagctatgcctacacacaggctgcttatgtcaccacctctgaccctacacggagcccatttccttcacagcatttggaagctcctgaagacaagtcatttggcagttcattgatggagagtgaagtaaacctggaccgttatcaaacagctttagaagaagtattatcgtggcttctttctgctgaggacacattgcaagcacaaggagagatttctaatgatgtggaagtggtgaaagaccagtttcatactcatgaggggtacatgatggatttgacagcccatcagggccgggttggtaatattctacaattgggaagtaagctgattggaacaggaaaattatcagaagatgaagaaactgaagtacaagagcagatgaatctcctaaattcaagatgggaatgcctcagggtagctagcatggaaaaacaaagcaatttacatagagttttaatggatctccagaatcagaaactgaaagagttgaatgactggctaacaaaaacagaagaaagaacaaggaaaatggaggaagagcctcttggacctgatcttgaagacctaaaacgccaagtacaacaacataaggtgcttcaagaagatctagaacaagaacaagtcagggtcaattctctcactcacatggtggtggtagttgatgaatctagtggagatcacgcaactgctgctttggaagaacaacttaaggtattgggagatcgatgggcaaacatctgtagatggacagaagaccgctgggttcttttacaagaccacactgtccgtgaagaaacgatgatggtgatgactgaagacatgcctttggaaatttcttatgtgccttctacttatttgactgaaatcactcatgtctcacaagccctattagaagtggaacaacttctcaatgctcctgacctctgtgctaaggactttgaagatctctttaagcaagaggagtctctgaagaatataaaagatagtctacaacaaagctcaggtcggattgacattattcatagcaagaagacagcagcattgcaaagtgcaacgcctgtggaaagggtgaagctacaggaagctctctcccagcttgatttccaatgggaaaaagttaacaaaatgtacaaggaccgacaagggcgatttgacagatctgttgagaaatggcggcgttttcattatgatataaagatatttaatcagtggctaacagaagctgaacagtttctcagaaagacacaaattcctgagaattgggaacatgctaaatacaaatggtatcttaaggaactccaggatggcattgggcagcggcaaactgttgtcagaacattgaatgcaactggggaagaaataattcagcaatcctcaaaaacagatgccagtattctacaggaaaaattgggaagcctgaatctgcggtggcaggaggtctgcaaacagctgtcagacagaaaaaagaggctagaagaacaaaagtggcagagaaaaatagatgagacccttgaaagactccgggaacttcaagaggccacggatgagctggacctcaagctgcgccaagctgaggtgatcaagggatcctggcagcccgtgggcgatctcctcattgactctctccaagatcacctcgagaaagtcaaggcacttcgaggagaaattgcgcctctgaaagagaacgtgagccacgtcaatgaccttgctcgccagcttaccactttgggcattcagctctcaccgtataacctcagcactctggaagacctgaacaccagatggaagcttctgcaggtggccgtcgaggaccgagtcaggcagctgcatgaagcccacagggactttggtccagcatctcagcactttctttccacgtctgtccagggtccctgggagagagccatctcgccaaacaaagtgccctactatatcaaccacgagactcaaacaacttgctgggaccatcccaaaatgacagagctctaccagtctttagctgacctgaataatgtcagattctcagcttataggactgccatgaaactccgaagactgcagaaggccctttgcttggatctcttgagcctgtcagctgcatgtgatgccttggaccagcacaacctcaagcaaaatgaccagcccatggatatcctgcagattattaattgtttgaccactatttatgaccgcctggagcaagagcacaacaatttggtcaacgtccctctctgcgtggatatgtgtctgaactggctgctgaatgtttatgatacgggacgaacagggaggatccgtgtcctgtcttttaaaactggcatcatttccctgtgtaaagcacatttggaagacaagtacagataccttttcaagcaagtggcaagttcaacaggattttgtgaccagcgcaggctgggcctccttctgcatgattctatccaaattccaagacagttgggtgaagttgcatcctttgggggcagtaacattgagccaagtgtccggagctgcttccaatttgctaataataagccagagatcgaagcggccctcttcctagactggatgagactggaaccccagtccatggtgtggctgcccgtcctgcacagagtggctgctgcagaaactgccaagcatcaggccaaatgtaacatctgcaaagagtgtccaatcattggattcaggtacaggagtctaaagcactttaattatgacatctgccaaagctgctttttttctggtcgagttgcaaaaggccataaaatgcactatcccatggtggaatattgcactccgactacatcaggagaagatgttcgagactttgccaaggtactaaaaaacaaatttcgaaccaaaaggtattttgcgaagcatccccgaatgggctacctgccagtgcagactgtcttagagggggacaacatggaaactcccgttactctgatcaacttctggccagtagattctgcgcctgcctcgtcccctcagctttcacacgatgatactcattcacgcattgaacattatgctagcaggctagcagaaatggaaaacagcaatggatcttatctaaatgatagcatctctcctaatgagagcatagatgatgaacatttgttaatccagcattactgccaaagtttgaaccaggactcccccctgagccagcctcgtagt

SEQ ID NO: 31 - DNA, 3831 bp, synthetic construct
  source 1..3831: mol_type = other DNA
atgctgtggtgggaggaggtggaggactgctacgagcgggaggacgtgcagaagaagaccttcaccaagtgggtgaacgcccagttcagcaagttcggcaagcagcacatcgagaacctgttcagcgacctgcaggacggccggcggctgctggacctgctggagggcctgaccggccagaagctgcccaaggagaagggcagcacccgggtgcacgccctgaacaacgtgaacaaggccctgcgggtgctgcagaacaacaacgtggacctggtgaacatcggcagcaccgacatcgtggacggcaaccacaagctgaccctgggcctgatctggaacatcatcctgcactggcaggtgaagaacgtgatgaagaacatcatggccggcctgcagcagaccaacagcgagaagatcctgctgagctgggtgcggcagagcacccggaactacccccaggtgaacgtgatcaacttcaccaccagctggagcgacggcctggccctgaacgccctgatccacagccaccggcccgacctgttcgactggaacagcgtggtgtgccagcagagcgccacccagcggctggagcacgccttcaacatcgcccggtaccagctgggcatcgagaagctgctggaccccgaggacgtggacaccacctaccccgacaagaagagcatcctgatgtacatcaccagcctgttccaggtgctgccccagcaggtgagcatcgaggccatccaggaggtggagatgctgccccggccccccaaggtgaccaaggaggagcacttccagctgcaccaccagatgcactacagccagcagatcaccgtgagcctggcccagggctacgagcggaccagcagccccaagccccggttcaagagctacgcctacacccaggccgcctacgtgaccaccagcgaccccacccggagccccttccccagccagcacctggaggcccccgaggacaagagcttcggcagcagcctgatggagagcgaggtgaacctggaccggtaccagaccgccctggaggaggtgctgagctggctgctgagcgccgaggacaccctgcaggcccagggcgagatcagcaacgacgtggaggtggtgaaggaccagttccacacccacgagggctacatgatggacctgaccgcccaccagggccgggtgggcaacatcctgcagctgggcagcaagctgatcggcaccggcaagctgagcgaggacgaggagaccgaggtgcaggagcagatgaacctgctgaacagccggtgggagtgcctgcgggtggccagcatggagaagcagagcaacctgcaccgggtgctgatggacctgcagaaccagaagctgaaggagctgaacgactggctgaccaagaccgaggagcggacccggaagatggaggaggagcccctgggccccgacctggaggacctgaagcggcaggtgcagcagcacaaggtgctgcaggaggacctggagcaggagcaggtgcgggtgaacagcctgacccacatggtggtggtggtggacgagagcagcggcgaccacgccaccgccgccctggaggagcagctgaaggtgctgggcgaccggtgggccaacatctgccggtggaccgaggaccggtgggtgctgctgcaggaccacaccgtgcgggaggagaccatgatggtgatgaccgaggacatgcccctggagatcagctacgtgcccagcacctacctgaccgagatcacccacgtgagccaggccctgctggaggtggagcagctgctgaacgcccccgacctgtgcgccaaggacttcgaggacctgttcaagcaggaggagagcctgaagaacatcaaggacagcctgcagcagagcagcggccggatcgacatcatccacagcaagaagaccgccgccctgcagagcgccacccccgtggagcgggtgaagctgcaggaggccctgagccagctggacttccagtgggagaaggtgaacaagatgtacaaggaccggcagggccggttcgaccggagcgtggagaagtggcggcggttccactacgacatcaagatcttcaaccagtggctgaccgaggccgagcagttcctgcggaagacccagatccccgagaactgggagcacgccaagtacaagtggtacctgaaggagctgcaggacggcatcggccagcggcagaccgtggtgcggaccctgaacgccaccggcgaggagatcatccagcagagcagcaagaccgacgccagcatcctgcaggagaagctgggcagcctgaacctgcggtggcaggaggtgtgcaagcagctgagcgaccggaagaagcggctggaggagcagaagtggcagcggaagatcgacgagaccctggagcggctgcaggagctgcaggaggccaccgacgagctggacctgaagctgcggcaggccgaggtgatcaagggcagctggcagcccgtgggcgacctgctgatcgacagcctgcaggaccacctggagaaggtgaaggccctgcggggcgagatcgcccccctgaaggagaacgtgagccacgtgaacgacctggcccggcagctgaccaccctgggcatccagctgagcccctacaacctgagcaccctggaggacctgaacacccggtggaagctgctgcaggtggccgtggaggaccgggtgcggcagctgcacgaggcccaccgggacttcggccccgccagccagcacttcctgagcaccagcgtgcagggcccctgggagcgggccatcagccccaacaaggtgccctactacatcaaccacgagacccagaccacctgctgggaccaccccaagatgaccgagctgtaccagagcctggccgacctgaacaacgtgcggttcagcgcctaccggaccgccatgaagctgcggcggctgcagaaggccctgtgcctggacctgctgagcctgagcgccgcctgcgacgccctggaccagcacaacctgaagcagaacgaccagcccatggacatcctgcagatcatcaactgcctgaccaccatctacgaccggctggagcaggagcacaacaacctggtgaacgtgcccctgtgcgtggacatgtgcctgaactggctgctgaacgtgtacgacaccggccggaccggccggatccgggtgctgagcttcaagaccggcatcatcagcctgtgcaaggcccacctggaggacaagtaccggtacctgttcaagcaggtggccagcagcaccggcttctgcgaccagcggcggctgggcctgctgctgcacgacagcatccagatcccccggcagctgggcgaggtggccagcttcggcggcagcaacatcgagcccagcgtgcggagctgcttccagttcgccaacaacaagcccgagatcgaggccgccctgttcctggactggatgcggctggagccccagagcatggtgtggctgcccgtgctgcaccgggtggccgccgccgagaccgccaagcaccaggccaagtgcaacatctgcaaggagtgccccatcatcggcttccggtaccggagcctgaagcacttcaactacgacatctgccagagctgcttcttcagcggccgggtggccaagggccacaagatgcactaccccatggtggagtactgcacccccaccaccagcggcgaggacgtgcgggacttcgccaaggtgctgaagaacaagttccggaccaagcggtacttcgccaagcacccccggatgggctacctgcccgtgcagaccgtgctggagggcgacaacatggagaccccc

SEQ ID NO: 32 - DNA, 3711 bp, synthetic construct
  source 1..3711: mol_type = other DNA
atgctgtggtgggaggaggtggaggactgctacgagcgggaggacgtgcagaagaagaccttcaccaagtgggtgaacgcccagttcagcaagttcggcaagcagcacatcgagaacctgttcagcgacctgcaggacggccggcggctgctggacctgctggagggcctgaccggccagaagctgcccaaggagaagggcagcacccgggtgcacgccctgaacaacgtgaacaaggccctgcgggtgctgcagaacaacaacgtggacctggtgaacatcggcagcaccgacatcgtggacggcaaccacaagctgaccctgggcctgatctggaacatcatcctgcactggcaggtgaagaacgtgatgaagaacatcatggccggcctgcagcagaccaacagcgagaagatcctgctgagctgggtgcggcagagcacccggaactacccccaggtgaacgtgatcaacttcaccaccagctggagcgacggcctggccctgaacgccctgatccacagccaccggcccgacctgttcgactggaacagcgtggtgtgccagcagagcgccacccagcggctggagcacgccttcaacatcgcccggtaccagctgggcatcgagaagctgctggaccccgaggacgtggacaccacctaccccgacaagaagagcatcctgatgtacatcaccagcctgttccaggtgctgccccagcaggtgagcatcgaggccatccaggaggtggagatgctgccccggccccccaaggtgaccaaggaggagcacttccagctgcaccaccagatgcactacagccagcagatcaccgtgagcctggcccagggctacgagcggaccagcagccccaagccccggttcaagagctacgcctacacccaggccgcctacgtgaccaccagcgaccccacccggagccccttccccagccagcacctggaggcccccgaggacaagagcttcggcagcagcctgatggagagcgaggtgaacctggaccggtaccagaccgccctggaggaggtgctgagctggctgctgagcgccgaggacaccctgcaggcccagggcgagatcagcaacgacgtggaggtggtgaaggaccagttccacacccacgagggctacatgatggacctgaccgcccaccagggccgggtgggcaacatcctgcagctgggcagcaagctgatcggcaccggcaagctgagcgaggacgaggagaccgaggtgcaggagcagatgaacctgctgaacagccggtgggagtgcctgcgggtggccagcatggagaagcagagcaacctgcaccgggtgctgatggacctgcagaaccagaagctgaaggagctgaacgactggctgaccaagaccgaggagcggacccggaagatggaggaggagcccctgggccccgacctggaggacctgaagcggcaggtgcagcagcacaaggtgctgcaggaggacctggagcaggagcaggtgcgggtgaacagcctgacccacatggtggtggtggtggacgagagcagcggcgaccacgccaccgccgccctggaggagcagctgaaggtgctgggcgaccggtgggccaacatctgccggtggaccgaggaccggtgggtgctgctgcaggaccacaccgtgcgggaggagaccatgatggtgatgaccgaggacatgcccctggagatcagctacgtgcccagcacctacctgaccgagatcacccacgtgagccaggccctgctggaggtggagcagctgctgaacgcccccgacctgtgcgccaaggacttcgaggacctgttcaagcaggaggagagcctgaagaacatcaaggacagcctgcagcagagcagcggccggatcgacatcatccacagcaagaagaccgccgccctgcagagcgccacccccgtggagcgggtgaagctgcaggaggccctgagccagctggacttccagtgggagaaggtgaacaagatgtacaaggaccggcagggccggttcgaccggagcgtggagaagtggcggcggttccactacgacatcaagatcttcaaccagtggctgaccgaggccgagcagttcctgcggaagacccagatccccgagaactgggagcacgccaagtacaagtggtacctgaaggagctgcaggacggcatcggccagcggcagaccgtggtgcggaccctgaacgccaccggcgaggagatcatccagcagagcagcaagaccgacgccagcatcctgcaggagaagctgggcagcctgaacctgcggtggcaggaggtgtgcaagcagctgagcgaccggaagaagcggctggaggagcagaagggccccgccagccagcacttcctgagcaccagcgtgcagggcccctgggagcgggccatcagccccaacaaggtgccctactacatcaaccacgagacccagaccacctgctgggaccaccccaagatgaccgagctgtaccagagcctggccgacctgaacaacgtgcggttcagcgcctaccggaccgccatgaagctgcggcggctgcagaaggccctgtgcctggacctgctgagcctgagcgccgcctgcgacgccctggaccagcacaacctgaagcagaacgaccagcccatggacatcctgcagatcatcaactgcctgaccaccatctacgaccggctggagcaggagcacaacaacctggtgaacgtgcccctgtgcgtggacatgtgcctgaactggctgctgaacgtgtacgacaccggccggaccggccggatccgggtgctgagcttcaagaccggcatcatcagcctgtgcaaggcccacctggaggacaagtaccggtacctgttcaagcaggtggccagcagcaccggcttctgcgaccagcggcggctgggcctgctgctgcacgacagcatccagatcccccggcagctgggcgaggtggccagcttcggcggcagcaacatcgagcccagcgtgcggagctgcttccagttcgccaacaacaagcccgagatcgaggccgccctgttcctggactggatgcggctggagccccagagcatggtgtggctgcccgtgctgcaccgggtggccgccgccgagaccgccaagcaccaggccaagtgcaacatctgcaaggagtgccccatcatcggcttccggtaccggagcctgaagcacttcaactacgacatctgccagagctgcttcttcagcggccgggtggccaagggccacaagatgcactaccccatggtggagtactgcacccccaccaccagcggcgaggacgtgcgggacttcgccaaggtgctgaagaacaagttccggaccaagcggtacttcgccaagcacccccggatgggctacctgcccgtgcagaccgtgctggagggcgacaacatggagacccccgtgaccctgatcaacttctggcccgtggacagcgcccccgccagcagcccccagctgagccacgacgacacccacagccggatcgagcactacgccagccggctggccgagatggagaacagcaacggcagctacctgaacgacagcatcagccccaacgagagcatcgacgacgagcacctgctgatccagcactactgccagagcctgaaccaggacagccccctgagccagccccggagc

SEQ ID NO: 33 - DNA, 3900 bp, synthetic construct
  source 1..3900: mol_type = other DNA
atgctgtggtgggaggaggtggaggactgctacgagcgggaggacgtgcagaagaagaccttcaccaagtgggtgaacgcccagttcagcaagttcggcaagcagcacatcgagaacctgttcagcgacctgcaggacggccggcggctgctggacctgctggagggcctgaccggccagaagctgcccaaggagaagggcagcacccgggtgcacgccctgaacaacgtgaacaaggccctgcgggtgctgcagaacaacaacgtggacctggtgaacatcggcagcaccgacatcgtggacggcaaccacaagctgaccctgggcctgatctggaacatcatcctgcactggcaggtgaagaacgtgatgaagaacatcatggccggcctgcagcagaccaacagcgagaagatcctgctgagctgggtgcggcagagcacccggaactacccccaggtgaacgtgatcaacttcaccaccagctggagcgacggcctggccctgaacgccctgatccacagccaccggcccgacctgttcgactggaacagcgtggtgtgccagcagagcgccacccagcggctggagcacgccttcaacatcgcccggtaccagctgggcatcgagaagctgctggaccccgaggacgtggacaccacctaccccgacaagaagagcatcctgatgtacatcaccagcctgttccaggtgctgccccagcaggtgagcatcgaggccatccaggaggtggagatgctgccccggccccccaaggtgaccaaggaggagcacttccagctgcaccaccagatgcactacagccagcagatcaccgtgagcctggcccagggctacgagcggaccagcagccccaagccccggttcaagagctacgcctacacccaggccgcctacgtgaccaccagcgaccccacccggagccccttccccagccagcacctggaggcccccgaggacaagagcttcggcagcagcctgatggagagcgaggtgaacctggaccggtaccagaccgccctggaggaggtgctgagctggctgctgagcgccgaggacaccctgcaggcccagggcgagatcagcaacgacgtggaggtggtgaaggaccagttccacacccacgagggctacatgatggacctgaccgcccaccagggccgggtgggcaacatcctgcagctgggcagcaagctgatcggcaccggcaagctgagcgaggacgaggagaccgaggtgcaggagcagatgaacctgctgaacagccggtgggagtgcctgcgggtggccagcatggagaagcagagcaacctgcaccgggtgctgatggacctgcagaaccagaagctgaaggagctgaacgactggctgaccaagaccgaggagcggacccggaagatggaggaggagcccctgggccccgacctggaggacctgaagcggcaggtgcagcagcacaaggtgctgcaggaggacctggagcaggagcaggtgcgggtgaacagcctgacccacatggtggtggtggtggacgagagcagcggcgaccacgccaccgccgccctggaggagcagctgaaggtgctgggcgaccggtgggccaacatctgccggtggaccgaggaccggtgggtgctgctgcaggaccacaccgtgcgggaggagaccatgatggtgatgaccgaggacatgcccctggagatcagctacgtgcccagcacctacctgaccgagatcacccacgtgagccaggccctgctggaggtggagcagctgctgaacgcccccgacctgtgcgccaaggacttcgaggacctgttcaagcaggaggagagcctgaagaacatcaaggacagcctgcagcagagcagcggccggatcgacatcatccacagcaagaagaccgccgccctgcagagcgccacccccgtggagcgggtgaagctgcaggaggccctgagccagctggacttccagtgggagaaggtgaacaagatgtacaaggaccggcagggccggttcgaccggagcgtggagaagtggcggcggttccactacgacatcaagatcttcaaccagtggctgaccgaggccgagcagttcctgcggaagacccagatccccgagaactgggagcacgccaagtacaagtggtacctgaaggagctgcaggacggcatcggccagcggcagaccgtggtgcggaccctgaacgccaccggcgaggagatcatccagcagagcagcaagaccgacgccagcatcctgcaggagaagctgggcagcctgaacctgcggtggcaggaggtgtgcaagcagctgagcgaccggaagaagcggctggaggagcagaagggccccgccagccagcacttcctgagcaccagcgtgcagggcccctgggagcgggccatcagccccaacaaggtgccctactacatcaaccacgagacccagaccacctgctgggaccaccccaagatgaccgagctgtaccagagcctggccgacctgaacaacgtgcggttcagcgcctaccggaccgccatgaagctgcggcggctgcagaaggccctgtgcctggacctgctgagcctgagcgccgcctgcgacgccctggaccagcacaacctgaagcagaacgaccagcccatggacatcctgcagatcatcaactgcctgaccaccatctacgaccggctggagcaggagcacaacaacctggtgaacgtgcccctgtgcgtggacatgtgcctgaactggctgctgaacgtgtacgacaccggccggaccggccggatccgggtgctgagcttcaagaccggcatcatcagcctgtgcaaggcccacctggaggacaagtaccggtacctgttcaagcaggtggccagcagcaccggcttctgcgaccagcggcggctgggcctgctgctgcacgacagcatccagatcccccggcagctgggcgaggtggccagcttcggcggcagcaacatcgagcccagcgtgcggagctgcttccagttcgccaacaacaagcccgagatcgaggccgccctgttcctggactggatgcggctggagccccagagcatggtgtggctgcccgtgctgcaccgggtggccgccgccgagaccgccaagcaccaggccaagtgcaacatctgcaaggagtgccccatcatcggcttccggtaccggagcctgaagcacttcaactacgacatctgccagagctgcttcttcagcggccgggtggccaagggccacaagatgcactaccccatggtggagtactgcacccccaccaccagcggcgaggacgtgcgggacttcgccaaggtgctgaagaacaagttccggaccaagcggtacttcgccaagcacccccggatgggctacctgcccgtgcagaccgtgctggagggcgacaacatggagacccccgtgaccctgatcaacttctggcccgtggacagcgcccccgccagcagcccccagctgagccacgacgacacccacagccggatcgagcactacgccagccggctggccgagatggagaacagcaacggcagctacctgaacgacagcatcagccccaacgagagcatcgacgacgagcacctgctgatccagcactactgccagagcctgaaccaggacagccccctgagccagccccggagccccgcccagatcctgatcagcctggagagcgaggagcggggcgagctggagcggatcctggccgacctggaggaggagaaccggaacctgcaggccgagtacgaccggctgaagcagcagcacgagcacaagggcctgagccccctgcccagcccccccgagatgatgcccaccagcccccagagcccc

SEQ ID NO: 34 - DNA, 4263 bp, synthetic construct
  source 1..4263: mol_type = other DNA
atgctgtggtgggaggaggtggaggactgctacgagcgggaggacgtgcagaagaagaccttcaccaagtgggtgaacgcccagttcagcaagttcggcaagcagcacatcgagaacctgttcagcgacctgcaggacggccggcggctgctggacctgctggagggcctgaccggccagaagctgcccaaggagaagggcagcacccgggtgcacgccctgaacaacgtgaacaaggccctgcgggtgctgcagaacaacaacgtggacctggtgaacatcggcagcaccgacatcgtggacggcaaccacaagctgaccctgggcctgatctggaacatcatcctgcactggcaggtgaagaacgtgatgaagaacatcatggccggcctgcagcagaccaacagcgagaagatcctgctgagctgggtgcggcagagcacccggaactacccccaggtgaacgtgatcaacttcaccaccagctggagcgacggcctggccctgaacgccctgatccacagccaccggcccgacctgttcgactggaacagcgtggtgtgccagcagagcgccacccagcggctggagcacgccttcaacatcgcccggtaccagctgggcatcgagaagctgctggaccccgaggacgtggacaccacctaccccgacaagaagagcatcctgatgtacatcaccagcctgttccaggtgctgccccagcaggtgagcatcgaggccatccaggaggtggagatgctgccccggccccccaaggtgaccaaggaggagcacttccagctgcaccaccagatgcactacagccagcagatcaccgtgagcctggcccagggctacgagcggaccagcagccccaagccccggttcaagagctacgcctacacccaggccgcctacgtgaccaccagcgaccccacccggagccccttccccagccagcacctggaggcccccgaggacaagagcttcggcagcagcctgatggagagcgaggtgaacctggaccggtaccagaccgccctggaggaggtgctgagctggctgctgagcgccgaggacaccctgcaggcccagggcgagatcagcaacgacgtggaggtggtgaaggaccagttccacacccacgagggctacatgatggacctgaccgcccaccagggccgggtgggcaacatcctgcagctgggcagcaagctgatcggcaccggcaagctgagcgaggacgaggagaccgaggtgcaggagcagatgaacctgctgaacagccggtgggagtgcctgcgggtggccagcatggagaagcagagcaacctgcaccgggtgctgatggacctgcagaaccagaagctgaaggagctgaacgactggctgaccaagaccgaggagcggacccggaagatggaggaggagcccctgggccccgacctggaggacctgaagcggcaggtgcagcagcacaaggtgctgcaggaggacctggagcaggagcaggtgcgggtgaacagcctgacccacatggtggtggtggtggacgagagcagcggcgaccacgccaccgccgccctggaggagcagctgaaggtgctgggcgaccggtgggccaacatctgccggtggaccgaggaccggtgggtgctgctgcaggaccacaccgtgcgggaggagaccatgatggtgatgaccgaggacatgcccctggagatcagctacgtgcccagcacctacctgaccgagatcacccacgtgagccaggccctgctggaggtggagcagctgctgaacgcccccgacctgtgcgccaaggacttcgaggacctgttcaagcaggaggagagcctgaagaacatcaaggacagcctgcagcagagcagcggccggatcgacatcatccacagcaagaagaccgccgccctgcagagcgccacccccgtggagcgggtgaagctgcaggaggccctgagccagctggacttccagtgggagaaggtgaacaagatgtacaaggaccggcagggccggttcgaccggagcgtggagaagtggcggcggttccactacgacatcaagatcttcaaccagtggctgaccgaggccgagcagttcctgcggaagacccagatccccgagaactgggagcacgccaagtacaagtggtacctgaaggagctgcaggacggcatcggccagcggcagaccgtggtgcggaccctgaacgccaccggcgaggagatcatccagcagagcagcaagaccgacgccagcatcctgcaggagaagctgggcagcctgaacctgcggtggcaggaggtgtgcaagcagctgagcgaccggaagaagcggctggaggagcagaagtggcagcggaagatcgacgagaccctggagcggctgcaggagctgcaggaggccaccgacgagctggacctgaagctgcggcaggccgaggtgatcaagggcagctggcagcccgtgggcgacctgctgatcgacagcctgcaggaccacctggagaaggtgaaggccctgcggggcgagatcgcccccctgaaggagaacgtgagccacgtgaacgacctggcccggcagctgaccaccctgggcatccagctgagcccctacaacctgagcaccctggaggacctgaacacccggtggaagctgctgcaggtggccgtggaggaccgggtgcggcagctgcacgaggcccaccgggacttcggccccgccagccagcacttcctgagcaccagcgtgcagggcccctgggagcgggccatcagccccaacaaggtgccctactacatcaaccacgagacccagaccacctgctgggaccaccccaagatgaccgagctgtaccagagcctggccgacctgaacaacgtgcggttcagcgcctaccggaccgccatgaagctgcggcggctgcagaaggccctgtgcctggacctgctgagcctgagcgccgcctgcgacgccctggaccagcacaacctgaagcagaacgaccagcccatggacatcctgcagatcatcaactgcctgaccaccatctacgaccggctggagcaggagcacaacaacctggtgaacgtgcccctgtgcgtggacatgtgcctgaactggctgctgaacgtgtacgacaccggccggaccggccggatccgggtgctgagcttcaagaccggcatcatcagcctgtgcaaggcccacctggaggacaagtaccggtacctgttcaagcaggtggccagcagcaccggcttctgcgaccagcggcggctgggcctgctgctgcacgacagcatccagatcccccggcagctgggcgaggtggccagcttcggcggcagcaacatcgagcccagcgtgcggagctgcttccagttcgccaacaacaagcccgagatcgaggccgccctgttcctggactggatgcggctggagccccagagcatggtgtggctgcccgtgctgcaccgggtggccgccgccgagaccgccaagcaccaggccaagtgcaacatctgcaaggagtgccccatcatcggcttccggtaccggagcctgaagcacttcaactacgacatctgccagagctgcttcttcagcggccgggtggccaagggccacaagatgcactaccccatggtggagtactgcacccccaccaccagcggcgaggacgtgcgggacttcgccaaggtgctgaagaacaagttccggaccaagcggtacttcgccaagcacccccggatgggctacctgcccgtgcagaccgtgctggagggcgacaacatggagacccccgtgaccctgatcaacttctggcccgtggacagcgcccccgccagcagcccccagctgagccacgacgacacccacagccggatcgagcactacgccagccggctggccgagatggagaacagcaacggcagctacctgaacgacagcatcagccccaacgagagcatcgacgacgagcacctgctgatccagcactactgccagagcctgaaccaggacagccccctgagccagccccggagccccgcccagatcctgatcagcctggagagcgaggagcggggcgagctggagcggatcctggccgacctggaggaggagaaccggaacctgcaggccgagtacgaccggctgaagcagcagcacgagcacaagggcctgagccccctgcccagcccccccgagatgatgcccaccagcccccagagcccc

SEQ ID NO: 35 - DNA, 4293 bp, synthetic construct
  source 1..4293: mol_type = other DNA
atgctgtggtgggaggaggtggaggactgctacgagcgggaggacgtgcagaagaagaccttcaccaagtgggtgaacgcccagttcagcaagttcggcaagcagcacatcgagaacctgttcagcgacctgcaggacggccggcggctgctggacctgctggagggcctgaccggccagaagctgcccaaggagaagggcagcacccgggtgcacgccctgaacaacgtgaacaaggccctgcgggtgctgcagaacaacaacgtggacctggtgaacatcggcagcaccgacatcgtggacggcaaccacaagctgaccctgggcctgatctggaacatcatcctgcactggcaggtgaagaacgtgatgaagaacatcatggccggcctgcagcagaccaacagcgagaagatcctgctgagctgggtgcggcagagcacccggaactacccccaggtgaacgtgatcaacttcaccaccagctggagcgacggcctggccctgaacgccctgatccacagccaccggcccgacctgttcgactggaacagcgtggtgtgccagcagagcgccacccagcggctggagcacgccttcaacatcgcccggtaccagctgggcatcgagaagctgctggaccccgaggacgtggacaccacctaccccgacaagaagagcatcctgatgtacatcaccagcctgttccaggtgctgccccagcaggtgagcatcgaggccatccaggaggtggagatgctgccccggccccccaaggtgaccaaggaggagcacttccagctgcaccaccagatgcactacagccagcagatcaccgtgagcctggcccagggctacgagcggaccagcagccccaagccccggttcaagagctacgcctacacccaggccgcctacgtgaccaccagcgaccccacccggagccccttccccagccagcacctggaggcccccgaggacaagagcttcggcagcagcctgatggagagcgaggtgaacctggaccggtaccagaccgccctggaggaggtgctgagctggctgctgagcgccgaggacaccctgcaggcccagggcgagatcagcaacgacgtggaggtggtgaaggaccagttccacacccacgagggctacatgatggacctgaccgcccaccagggccgggtgggcaacatcctgcagctgggcagcaagctgatcggcaccggcaagctgagcgaggacgaggagaccgaggtgcaggagcagatgaacctgctgaacagccggtgggagtgcctgcgggtggccagcatggagaagcagagcaacctgcaccgggtgctgatggacctgcagaaccagaagctgaaggagctgaacgactggctgaccaagaccgaggagcggacccggaagatggaggaggagcccctgggccccgacctggaggacctgaagcggcaggtgcagcagcacaaggtgctgcaggaggacctggagcaggagcaggtgcgggtgaacagcctgacccacatggtggtggtggtggacgagagcagcggcgaccacgccaccgccgccctggaggagcagctgaaggtgctgggcgaccggtgggccaacatctgccggtggaccgaggaccggtgggtgctgctgcaggaccacctgagcctgcaggagctgctggtgtggctgcagctgaaggacgacgagctgagccggcaggcccccatcggcggcgacttccccgccgtgcagaagcagaacgacgtgcaccgggccttcaagcgggagctgaagaccaaggagcccgtgatcatgagcaccctggagaccgtgcggatcttcctgaccgagcagcccctggagggcctggagaagctgtaccaggagccccgggagctgccccccgaggagcgggcccagaacgtgacccggctgctgcggaagcaggccgaggaggtgaacaccgagtgggagaagctgaacctgcacagcgccgactggcagcggaagatcgacgagaccctggagcggctgcaggagctgcaggaggccaccgacgagctggacctgaagctgcggcaggccgaggtgatcaagggcagctggcagcccgtgggcgacctgctgatcgacagcctgcaggaccacctggagaaggtgaaggccctgcggggcgagatcgcccccctgaaggagaacgtgagccacgtgaacgacctggcccggcagctgaccaccctgggcatccagctgagcccctacaacctgagcaccctggaggacctgaacacccggtggaagctgctgcaggtggccgtggaggaccgggtgcggcagctgcacgaggcccaccgggacttcggccccgccagccagcacttcctgagcaccagcgtgcagggcccctgggagcgggccatcagccccaacaaggtgccctactacatcaaccacgagacccagaccacctgctgggaccaccccaagatgaccgagctgtaccagagcctggccgacctgaacaacgtgcggttcagcgcctaccggaccgccatgaagctgcggcggctgcagaaggccctgtgcctggacctgctgagcctgagcgccgcctgcgacgccctggaccagcacaacctgaagcagaacgaccagcccatggacatcctgcagatcatcaactgcctgaccaccatctacgaccggctggagcaggagcacaacaacctggtgaacgtgcccctgtgcgtggacatgtgcctgaactggctgctgaacgtgtacgacaccggccggaccggccggatccgggtgctgagcttcaagaccggcatcatcagcctgtgcaaggcccacctggaggacaagtaccggtacctgttcaagcaggtggccagcagcaccggcttctgcgaccagcggcggctgggcctgctgctgcacgacagcatccagatcccccggcagctgggcgaggtggccagcttcggcggcagcaacatcgagcccagcgtgcggagctgcttccagttcgccaacaacaagcccgagatcgaggccgccctgttcctggactggatgcggctggagccccagagcatggtgtggctgcccgtgctgcaccgggtggccgccgccgagaccgccaagcaccaggccaagtgcaacatctgcaaggagtgccccatcatcggcttccggtaccggagcctgaagcacttcaactacgacatctgccagagctgcttcttcagcggccgggtggccaagggccacaagatgcactaccccatggtggagtactgcacccccaccaccagcggcgaggacgtgcgggacttcgccaaggtgctgaagaacaagttccggaccaagcggtacttcgccaagcacccccggatgggctacctgcccgtgcagaccgtgctggagggcgacaacatggagacccccgtgaccctgatcaacttctggcccgtggacagcgcccccgccagcagcccccagctgagccacgacgacacccacagccggatcgagcactacgccagccggctggccgagatggagaacagcaacggcagctacctgaacgacagcatcagccccaacgagagcatcgacgacgagcacctgctgatccagcactactgccagagcctgaaccaggacagccccctgagccagccccggagccccgcccagatcctgatcagcctggagagcgaggagcggggcgagctggagcggatcctggccgacctggaggaggagaaccggaacctgcaggccgagtacgaccggctgaagcagcagcacgagcacaagggcctgagccccctgcccagcccccccgagatgatgcccaccagcccccagagcccccgggacgccgagctgatcgccgaggccaagctgctgcggcagcacaagggccggctggaggcccggatgcagatcctggaggaccacaacaagcagctggagagccagctgcaccggctgcggcagctgctggagcagccccaggccgaggccaaggtgaacggcaccaccgtgagcagccccagcaccagcctgcagcggagcgacagcagccagcccatgctgctgcgggtggtgggcagccagaccagcgacagcatgggcgaggaggacctgctgagccccccccaggacaccagcaccggcctggaggaggtgatggagcagctgaacaacagcttccccagcagccggggccggaacacccccggcaagcccatgcgggaggacaccatg

SEQ ID NO: 36 - DNA, 4296 bp, synthetic construct
  source 1..4296: mol_type = other DNA
atgctgtggtgggaggaggtggaggactgctacgagcgggaggacgtgcagaagaagaccttcaccaagtgggtgaacgcccagttcagcaagttcggcaagcagcacatcgagaacctgttcagcgacctgcaggacggccggcggctgctggacctgctggagggcctgaccggccagaagctgcccaaggagaagggcagcacccgggtgcacgccctgaacaacgtgaacaaggccctgcgggtgctgcagaacaacaacgtggacctggtgaacatcggcagcaccgacatcgtggacggcaaccacaagctgaccctgggcctgatctggaacatcatcctgcactggcaggtgaagaacgtgatgaagaacatcatggccggcctgcagcagaccaacagcgagaagatcctgctgagctgggtgcggcagagcacccggaactacccccaggtgaacgtgatcaacttcaccaccagctggagcgacggcctggccctgaacgccctgatccacagccaccggcccgacctgttcgactggaacagcgtggtgtgccagcagagcgccacccagcggctggagcacgccttcaacatcgcccggtaccagctgggcatcgagaagctgctggaccccgaggacgtggacaccacctaccccgacaagaagagcatcctgatgtacatcaccagcctgttccaggtgctgccccagcaggtgagcatcgaggccatccaggaggtggagatgctgccccggccccccaaggtgaccaaggaggagcacttccagctgcaccaccagatgcactacagccagcagatcaccgtgagcctggcccagggctacgagcggaccagcagccccaagccccggttcaagagctacgcctacacccaggccgcctacgtgaccaccagcgaccccacccggagccccttccccagccagcacctggaggcccccgaggacaagagcttcggcagcagcctgatggagagcgaggtgaacctggaccggtaccagaccgccctggaggaggtgctgagctggctgctgagcgccgaggacaccctgcaggcccagggcgagatcagcaacgacgtggaggtggtgaaggaccagttccacacccacgagggctacatgatggacctgaccgcccaccagggccgggtgggcaacatcctgcagctgggcagcaagctgatcggcaccggcaagctgagcgaggacgaggagaccgaggtgcaggagcagatgaacctgctgaacagccggtgggagtgcctgcgggtggccagcatggagaagcagagcaacctgcaccgggtgctgatggacctgcagaaccagaagctgaaggagctgaacgactggctgaccaagaccgaggagcggacccggaagatggaggaggagcccctgggccccgacctggaggacctgaagcggcaggtgcagcagcacaaggtgctgcaggaggacctggagcaggagcaggtgcgggtgaacagcctgacccacatggtggtggtggtggacgagagcagcggcgaccacgccaccgccgccctggaggagcagctgaaggtgctgggcgaccggtgggccaacatctgccggtggaccgaggaccggtgggtgctgctgcaggaccacaccgtgcgggaggagaccatgatggtgatgaccgaggacatgcccctggagatcagctacgtgcccagcacctacctgaccgagatcacccacgtgagccaggccctgctggaggtggagcagctgctgaacgcccccgacctgtgcgccaaggacttcgaggacctgttcaagcaggaggagagcctgaagaacatcaaggacagcctgcagcagagcagcggccggatcgacatcatccacagcaagaagaccgccgccctgcagagcgccacccccgtggagcgggtgaagctgcaggaggccctgagccagctggacttccagtgggagaaggtgaacaagatgtacaaggaccggcagggccggttcgaccggagcgtggagaagtggcggcggttccactacgacatcaagatcttcaaccagtggctgaccgaggccgagcagttcctgcggaagacccagatccccgagaactgggagcacgccaagtacaagtggtacctgaaggagctgcaggacggcatcggccagcggcagaccgtggtgcggaccctgaacgccaccggcgaggagatcatccagcagagcagcaagaccgacgccagcatcctgcaggagaagctgggcagcctgaacctgcggtggcaggaggtgtgcaagcagctgagcgaccggaagaagcggctggaggagcagaagggccccgccagccagcacttcctgagcaccagcgtgcagggcccctgggagcgggccatcagccccaacaaggtgccctactacatcaaccacgagacccagaccacctgctgggaccaccccaagatgaccgagctgtaccagagcctggccgacctgaacaacgtgcggttcagcgcctaccggaccgccatgaagctgcggcggctgcagaaggccctgtgcctggacctgctgagcctgagcgccgcctgcgacgccctggaccagcacaacctgaagcagaacgaccagcccatggacatcctgcagatcatcaactgcctgaccaccatctacgaccggctggagcaggagcacaacaacctggtgaacgtgcccctgtgcgtggacatgtgcctgaactggctgctgaacgtgtacgacaccggccggaccggccggatccgggtgctgagcttcaagaccggcatcatcagcctgtgcaaggcccacctggaggacaagtaccggtacctgttcaagcaggtggccagcagcaccggcttctgcgaccagcggcggctgggcctgctgctgcacgacagcatccagatcccccggcagctgggcgaggtggccagcttcggcggcagcaacatcgagcccagcgtgcggagctgcttccagttcgccaacaacaagcccgagatcgaggccgccctgttcctggactggatgcggctggagccccagagcatggtgtggctgcccgtgctgcaccgggtggccgccgccgagaccgccaagcaccaggccaagtgcaacatctgcaaggagtgccccatcatcggcttccggtaccggagcctgaagcacttcaactacgacatctgccagagctgcttcttcagcggccgggtggccaagggccacaagatgcactaccccatggtggagtactgcacccccaccaccagcggcgaggacgtgcgggacttcgccaaggtgctgaagaacaagttccggaccaagcggtacttcgccaagcacccccggatgggctacctgcccgtgcagaccgtgctggagggcgacaacatggagacccccgtgaccctgatcaacttctggcccgtggacagcgcccccgccagcagcccccagctgagccacgacgacacccacagccggatcgagcactacgccagccggctggccgagatggagaacagcaacggcagctacctgaacgacagcatcagccccaacgagagcatcgacgacgagcacctgctgatccagcactactgccagagcctgaaccaggacagccccctgagccagccccggagccccgcccagatcctgatcagcctggagagcgaggagcggggcgagctggagcggatcctggccgacctggaggaggagaaccggaacctgcaggccgagtacgaccggctgaagcagcagcacgagcacaagggcctgagccccctgcccagcccccccgagatgatgcccaccagcccccagagcccccgggacgccgagctgatcgccgaggccaagctgctgcggcagcacaagggccggctggaggcccggatgcagatcctggaggaccacaacaagcagctggagagccagctgcaccggctgcggcagctgctggagcagccccaggccgaggccaaggtgaacggcaccaccgtgagcagccccagcaccagcctgcagcggagcgacagcagccagcccatgctgctgcgggtggtgggcagccagaccagcgacagcatgggcgaggaggacctgctgagccccccccaggacaccagcaccggcctggaggaggtgatggagcagctgaacaacagcttccccagcagccggggccggaacacccccggcaagcccatgcgggaggacaccatg

SEQ ID NO: 37 - DNA, 4344 bp, synthetic construct
  source 1..4344: mol_type = other DNA
atgctgtggtgggaggaggtggaggactgctacgagcgggaggacgtgcagaagaagaccttcaccaagtgggtgaacgcccagttcagcaagttcggcaagcagcacatcgagaacctgttcagcgacctgcaggacggccggcggctgctggacctgctggagggcctgaccggccagaagctgcccaaggagaagggcagcacccgggtgcacgccctgaacaacgtgaacaaggccctgcgggtgctgcagaacaacaacgtggacctggtgaacatcggcagcaccgacatcgtggacggcaaccacaagctgaccctgggcctgatctggaacatcatcctgcactggcaggtgaagaacgtgatgaagaacatcatggccggcctgcagcagaccaacagcgagaagatcctgctgagctgggtgcggcagagcacccggaactacccccaggtgaacgtgatcaacttcaccaccagctggagcgacggcctggccctgaacgccctgatccacagccaccggcccgacctgttcgactggaacagcgtggtgtgccagcagagcgccacccagcggctggagcacgccttcaacatcgcccggtaccagctgggcatcgagaagctgctggaccccgaggacgtggacaccacctaccccgacaagaagagcatcctgatgtacatcaccagcctgttccaggtgctgccccagcaggtgagcatcgaggccatccaggaggtggagatgctgccccggccccccaaggtgaccaaggaggagcacttccagctgcaccaccagatgcactacagccagcagatcaccgtgagcctggcccagggctacgagcggaccagcagccccaagccccggttcaagagctacgcctacacccaggccgcctacgtgaccaccagcgaccccacccggagccccttccccagccagcacctggaggcccccgaggacaagagcttcggcagcagcctgatggagagcgaggtgaacctggaccggtaccagaccgccctggaggaggtgctgagctggctgctgagcgccgaggacaccctgcaggcccagggcgagatcagcaacgacgtggaggtggtgaaggaccagttccacacccacgagggctacatgatggacctgaccgcccaccagggccgggtgggcaacatcctgcagctgggcagcaagctgatcggcaccggcaagctgagcgaggacgaggagaccgaggtgcaggagcagatgaacctgctgaacagccggtgggagtgcctgcgggtggccagcatggagaagcagagcaacctgcaccgggtgctgatggaccacaccgtgcgggaggagaccatgatggtgatgaccgaggacatgcccctggagatcagctacgtgcccagcacctacctgaccgagatcacccacgtgagccaggccctgctggaggtggagcagctgctgaacgcccccgacctgtgcgccaaggacttcgaggacctgttcaagcaggaggagagcctgaagaacatcaaggacagcctgcagcagagcagcggccggatcgacatcatccacagcaagaagaccgccgccctgcagagcgccacccccgtggagcgggtgaagctgcaggaggccctgagccagctggacttccagtgggagaaggtgaacaagatgtacaaggaccggcagggccggttcgaccggagcgtggagaagtggcggcggttccactacgacatcaagatcttcaaccagtggctgaccgaggccgagcagttcctgcggaagacccagatccccgagaactgggagcacgccaagtacaagtggtacctgaaggagctgcaggacggcatcggccagcggcagaccgtggtgcggaccctgaacgccaccggcgaggagatcatccagcagagcagcaagaccgacgccagcatcctgcaggagaagctgggcagcctgaacctgcggtggcaggaggtgtgcaagcagctgagcgaccggaagaagcggctggaggagcagaagtggcagcggaagatcgacgagaccctggagcggctgcaggagctgcaggaggccaccgacgagctggacctgaagctgcggcaggccgaggtgatcaagggcagctggcagcccgtgggcgacctgctgatcgacagcctgcaggaccacctggagaaggtgaaggccctgcggggcgagatcgcccccctgaaggagaacgtgagccacgtgaacgacctggcccggcagctgaccaccctgggcatccagctgagcccctacaacctgagcaccctggaggacctgaacacccggtggaagctgctgcaggtggccgtggaggaccgggtgcggcagctgcacgaggcccaccgggacttcggccccgccagccagcacttcctgagcaccagcgtgcagggcccctgggagcgggccatcagccccaacaaggtgccctactacatcaaccacgagacccagaccacctgctgggaccaccccaagatgaccgagctgtaccagagcctggccgacctgaacaacgtgcggttcagcgcctaccggaccgccatgaagctgcggcggctgcagaaggccctgtgcctggacctgctgagcctgagcgccgcctgcgacgccctggaccagcacaacctgaagcagaacgaccagcccatggacatcctgcagatcatcaactgcctgaccaccatctacgaccggctggagcaggagcacaacaacctggtgaacgtgcccctgtgcgtggacatgtgcctgaactggctgctgaacgtgtacgacaccggccggaccggccggatccgggtgctgagcttcaagaccggcatcatcagcctgtgcaaggcccacctggaggacaagtaccggtacctgttcaagcaggtggccagcagcaccggcttctgcgaccagcggcggctgggcctgctgctgcacgacagcatccagatcccccggcagctgggcgaggtggccagcttcggcggcagcaacatcgagcccagcgtgcggagctgcttccagttcgccaacaacaagcccgagatcgaggccgccctgttcctggactggatgcggctggagccccagagcatggtgtggctgcccgtgctgcaccgggtggccgccgccgagaccgccaagcaccaggccaagtgcaacatctgcaaggagtgccccatcatcggcttccggtaccggagcctgaagcacttcaactacgacatctgccagagctgcttcttcagcggccgggtggccaagggccacaagatgcactaccccatggtggagtactgcacccccaccaccagcggcgaggacgtgcgggacttcgccaaggtgctgaagaacaagttccggaccaagcggtacttcgccaagcacccccggatgggctacctgcccgtgcagaccgtgctggagggcgacaacatggagacccccgtgaccctgatcaacttctggcccgtggacagcgcccccgccagcagcccccagctgagccacgacgacacccacagccggatcgagcactacgccagccggctggccgagatggagaacagcaacggcagctacctgaacgacagcatcagccccaacgagagcatcgacgacgagcacctgctgatccagcactactgccagagcctgaaccaggacagccccctgagccagccccggagccccgcccagatcctgatcagcctggagagcgaggagcggggcgagctggagcggatcctggccgacctggaggaggagaaccggaacctgcaggccgagtacgaccggctgaagcagcagcacgagcacaagggcctgagccccctgcccagcccccccgagatgatgcccaccagcccccagagcccccgggacgccgagctgatcgccgaggccaagctgctgcggcagcacaagggccggctggaggcccggatgcagatcctggaggaccacaacaagcagctggagagccagctgcaccggctgcggcagctgctggagcagccccaggccgaggccaaggtgaacggcaccaccgtgagcagccccagcaccagcctgcagcggagcgacagcagccagcccatgctgctgcgggtggtgggcagccagaccagcgacagcatgggcgaggaggacctgctgagccccccccaggacaccagcaccggcctggaggaggtgatggagcagctgaacaacagcttccccagcagccggggccggaacacccccggcaagcccatgcgggaggacaccatg

SEQ ID NO: 38 - DNA, 4659 bp, synthetic construct
  source 1..4659: mol_type = other DNA
atgctgtggtgggaggaggtggaggactgctacgagcgggaggacgtgcagaagaagaccttcaccaagtgggtgaacgcccagttcagcaagttcggcaagcagcacatcgagaacctgttcagcgacctgcaggacggccggcggctgctggacctgctggagggcctgaccggccagaagctgcccaaggagaagggcagcacccgggtgcacgccctgaacaacgtgaacaaggccctgcgggtgctgcagaacaacaacgtggacctggtgaacatcggcagcaccgacatcgtggacggcaaccacaagctgaccctgggcctgatctggaacatcatcctgcactggcaggtgaagaacgtgatgaagaacatcatggccggcctgcagcagaccaacagcgagaagatcctgctgagctgggtgcggcagagcacccggaactacccccaggtgaacgtgatcaacttcaccaccagctggagcgacggcctggccctgaacgccctgatccacagccaccggcccgacctgttcgactggaacagcgtggtgtgccagcagagcgccacccagcggctggagcacgccttcaacatcgcccggtaccagctgggcatcgagaagctgctggaccccgaggacgtggacaccacctaccccgacaagaagagcatcctgatgtacatcaccagcctgttccaggtgctgccccagcaggtgagcatcgaggccatccaggaggtggagatgctgccccggccccccaaggtgaccaaggaggagcacttccagctgcaccaccagatgcactacagccagcagatcaccgtgagcctggcccagggctacgagcggaccagcagccccaagccccggttcaagagctacgcctacacccaggccgcctacgtgaccaccagcgaccccacccggagccccttccccagccagcacctggaggcccccgaggacaagagcttcggcagcagcctgatggagagcgaggtgaacctggaccggtaccagaccgccctggaggaggtgctgagctggctgctgagcgccgaggacaccctgcaggcccagggcgagatcagcaacgacgtggaggtggtgaaggaccagttccacacccacgagggctacatgatggacctgaccgcccaccagggccgggtgggcaacatcctgcagctgggcagcaagctgatcggcaccggcaagctgagcgaggacgaggagaccgaggtgcaggagcagatgaacctgctgaacagccggtgggagtgcctgcgggtggccagcatggagaagcagagcaacctgcaccgggtgctgatggacctgcagaaccagaagctgaaggagctgaacgactggctgaccaagaccgaggagcggacccggaagatggaggaggagcccctgggccccgacctggaggacctgaagcggcaggtgcagcagcacaaggtgctgcaggaggacctggagcaggagcaggtgcgggtgaacagcctgacccacatggtggtggtggtggacgagagcagcggcgaccacgccaccgccgccctggaggagcagctgaaggtgctgggcgaccggtgggccaacatctgccggtggaccgaggaccggtgggtgctgctgcaggaccacaccgtgcgggaggagaccatgatggtgatgaccgaggacatgcccctggagatcagctacgtgcccagcacctacctgaccgagatcacccacgtgagccaggccctgctggaggtggagcagctgctgaacgcccccgacctgtgcgccaaggacttcgaggacctgttcaagcaggaggagagcctgaagaacatcaaggacagcctgcagcagagcagcggccggatcgacatcatccacagcaagaagaccgccgccctgcagagcgccacccccgtggagcgggtgaagctgcaggaggccctgagccagctggacttccagtgggagaaggtgaacaagatgtacaaggaccggcagggccggttcgaccggagcgtggagaagtggcggcggttccactacgacatcaagatcttcaaccagtggctgaccgaggccgagcagttcctgcggaagacccagatccccgagaactgggagcacgccaagtacaagtggtacctgaaggagctgcaggacggcatcggccagcggcagaccgtggtgcggaccctgaacgccaccggcgaggagatcatccagcagagcagcaagaccgacgccagcatcctgcaggagaagctgggcagcctgaacctgcggtggcaggaggtgtgcaagcagctgagcgaccggaagaagcggctggaggagcagaagtggcagcggaagatcgacgagaccctggagcggctgcaggagctgcaggaggccaccgacgagctggacctgaagctgcggcaggccgaggtgatcaagggcagctggcagcccgtgggcgacctgctgatcgacagcctgcaggaccacctggagaaggtgaaggccctgcggggcgagatcgcccccctgaaggagaacgtgagccacgtgaacgacctggcccggcagctgaccaccctgggcatccagctgagcccctacaacctgagcaccctggaggacctgaacacccggtggaagctgctgcaggtggccgtggaggaccgggtgcggcagctgcacgaggcccaccgggacttcggccccgccagccagcacttcctgagcaccagcgtgcagggcccctgggagcgggccatcagccccaacaaggtgccctactacatcaaccacgagacccagaccacctgctgggaccaccccaagatgaccgagctgtaccagagcctggccgacctgaacaacgtgcggttcagcgcctaccggaccgccatgaagctgcggcggctgcagaaggccctgtgcctggacctgctgagcctgagcgccgcctgcgacgccctggaccagcacaacctgaagcagaacgaccagcccatggacatcctgcagatcatcaactgcctgaccaccatctacgaccggctggagcaggagcacaacaacctggtgaacgtgcccctgtgcgtggacatgtgcctgaactggctgctgaacgtgtacgacaccggccggaccggccggatccgggtgctgagcttcaagaccggcatcatcagcctgtgcaaggcccacctggaggacaagtaccggtacctgttcaagcaggtggccagcagcaccggcttctgcgaccagcggcggctgggcctgctgctgcacgacagcatccagatcccccggcagctgggcgaggtggccagcttcggcggcagcaacatcgagcccagcgtgcggagctgcttccagttcgccaacaacaagcccgagatcgaggccgccctgttcctggactggatgcggctggagccccagagcatggtgtggctgcccgtgctgcaccgggtggccgccgccgagaccgccaagcaccaggccaagtgcaacatctgcaaggagtgccccatcatcggcttccggtaccggagcctgaagcacttcaactacgacatctgccagagctgcttcttcagcggccgggtggccaagggccacaagatgcactaccccatggtggagtactgcacccccaccaccagcggcgaggacgtgcgggacttcgccaaggtgctgaagaacaagttccggaccaagcggtacttcgccaagcacccccggatgggctacctgcccgtgcagaccgtgctggagggcgacaacatggagacccccgtgaccctgatcaacttctggcccgtggacagcgcccccgccagcagcccccagctgagccacgacgacacccacagccggatcgagcactacgccagccggctggccgagatggagaacagcaacggcagctacctgaacgacagcatcagccccaacgagagcatcgacgacgagcacctgctgatccagcactactgccagagcctgaaccaggacagccccctgagccagccccggagccccgcccagatcctgatcagcctggagagcgaggagcggggcgagctggagcggatcctggccgacctggaggaggagaaccggaacctgcaggccgagtacgaccggctgaagcagcagcacgagcacaagggcctgagccccctgcccagcccccccgagatgatgcccaccagcccccagagcccccgggacgccgagctgatcgccgaggccaagctgctgcggcagcacaagggccggctggaggcccggatgcagatcctggaggaccacaacaagcagctggagagccagctgcaccggctgcggcagctgctggagcagccccaggccgaggccaaggtgaacggcaccaccgtgagcagccccagcaccagcctgcagcggagcgacagcagccagcccatgctgctgcgggtggtgggcagccagaccagcgacagcatgggcgaggaggacctgctgagccccccccaggacaccagcaccggcctggaggaggtgatggagcagctgaacaacagcttccccagcagccggggccggaacacccccggcaagcccatgcgggaggacaccatg

SEQ ID NO: 39 - DNA, 4074 bp, synthetic construct
  source 1..4074: mol_type = other DNA
atgctgtggtgggaggaggtggaggactgctacgagcgggaggacgtgcagaagaagaccttcaccaagtgggtgaacgcccagttcagcaagttcggcaagcagcacatcgagaacctgttcagcgacctgcaggacggccggcggctgctggacctgctggagggcctgaccggccagaagctgcccaaggagaagggcagcacccgggtgcacgccctgaacaacgtgaacaaggccctgcgggtgctgcagaacaacaacgtggacctggtgaacatcggcagcaccgacatcgtggacggcaaccacaagctgaccctgggcctgatctggaacatcatcctgcactggcaggtgaagaacgtgatgaagaacatcatggccggcctgcagcagaccaacagcgagaagatcctgctgagctgggtgcggcagagcacccggaactacccccaggtgaacgtgatcaacttcaccaccagctggagcgacggcctggccctgaacgccctgatccacagccaccggcccgacctgttcgactggaacagcgtggtgtgccagcagagcgccacccagcggctggagcacgccttcaacatcgcccggtaccagctgggcatcgagaagctgctggaccccgaggacgtggacaccacctaccccgacaagaagagcatcctgatgtacatcaccagcctgttccaggtgctgccccagcaggtgagcatcgaggccatccaggaggtggagatgctgccccggccccccaaggtgaccaaggaggagcacttccagctgcaccaccagatgcactacagccagcagatcaccgtgagcctggcccagggctacgagcggaccagcagccccaagccccggttcaagagctacgcctacacccaggccgcctacgtgaccaccagcgaccccacccggagccccttccccagccagcacctggaggcccccgaggacaagagcttcggcagcagcctgatggagagcgaggtgaacctggaccggtaccagaccgccctggaggaggtgctgagctggctgctgagcgccgaggacaccctgcaggcccagggcgagatcagcaacgacgtggaggtggtgaaggaccagttccacacccacgagggctacatgatggacctgaccgcccaccagggccgggtgggcaacatcctgcagctgggcagcaagctgatcggcaccggcaagctgagcgaggacgaggagaccgaggtgcaggagcagatgaacctgctgaacagccggtgggagtgcctgcgggtggccagcatggagaagcagagcaacctgcaccgggtgctgatggacctgcagaaccagaagctgaaggagctgaacgactggctgaccaagaccgaggagcggacccggaagatggaggaggagcccctgggccccgacctggaggacctgaagcggcaggtgcagcagcacaaggtgctgcaggaggacctggagcaggagcaggtgcgggtgaacagcctgacccacatggtggtggtggtggacgagagcagcggcgaccacgccaccgccgccctggaggagcagctgaaggtgctgggcgaccggtgggccaacatctgccggtggaccgaggaccggtgggtgctgctgcaggaccacaccgtgcgggaggagaccatgatggtgatgaccgaggacatgcccctggagatcagctacgtgcccagcacctacctgaccgagatcacccacgtgagccaggccctgctggaggtggagcagctgctgaacgcccccgacctgtgcgccaaggacttcgaggacctgttcaagcaggaggagagcctgaagaacatcaaggacagcctgcagcagagcagcggccggatcgacatcatccacagcaagaagaccgccgccctgcagagcgccacccccgtggagcgggtgaagctgcaggaggccctgagccagctggacttccagtgggagaaggtgaacaagatgtacaaggaccggcagggccggttcgaccggagcgtggagaagtggcggcggttccactacgacatcaagatcttcaaccagtggctgaccgaggccgagcagttcctgcggaagacccagatccccgagaactgggagcacgccaagtacaagtggtacctgaaggagctgcaggacggcatcggccagcggcagaccgtggtgcggaccctgaacgccaccggcgaggagatcatccagcagagcagcaagaccgacgccagcatcctgcaggagaagctgggcagcctgaacctgcggtggcaggaggtgtgcaagcagctgagcgaccggaagaagcggctggaggagcagaagtggcagcggaagatcgacgagaccctggagcggctgcaggagctgcaggaggccaccgacgagctggacctgaagctgcggcaggccgaggtgatcaagggcagctggcagcccgtgggcgacctgctgatcgacagcctgcaggaccacctggagaaggtgaaggccctgcggggcgagatcgcccccctgaaggagaacgtgagccacgtgaacgacctggcccggcagctgaccaccctgggcatccagctgagcccctacaacctgagcaccctggaggacctgaacacccggtggaagctgctgcaggtggccgtggaggaccgggtgcggcagctgcacgaggcccaccgggacttcggccccgccagccagcacttcctgagcaccagcgtgcagggcccctgggagcgggccatcagccccaacaaggtgccctactacatcaaccacgagacccagaccacctgctgggaccaccccaagatgaccgagctgtaccagagcctggccgacctgaacaacgtgcggttcagcgcctaccggaccgccatgaagctgcggcggctgcagaaggccctgtgcctggacctgctgagcctgagcgccgcctgcgacgccctggaccagcacaacctgaagcagaacgaccagcccatggacatcctgcagatcatcaactgcctgaccaccatctacgaccggctggagcaggagcacaacaacctggtgaacgtgcccctgtgcgtggacatgtgcctgaactggctgctgaacgtgtacgacaccggccggaccggccggatccgggtgctgagcttcaagaccggcatcatcagcctgtgcaaggcccacctggaggacaagtaccggtacctgttcaagcaggtggccagcagcaccggcttctgcgaccagcggcggctgggcctgctgctgcacgacagcatccagatcccccggcagctgggcgaggtggccagcttcggcggcagcaacatcgagcccagcgtgcggagctgcttccagttcgccaacaacaagcccgagatcgaggccgccctgttcctggactggatgcggctggagccccagagcatggtgtggctgcccgtgctgcaccgggtggccgccgccgagaccgccaagcaccaggccaagtgcaacatctgcaaggagtgccccatcatcggcttccggtaccggagcctgaagcacttcaactacgacatctgccagagctgcttcttcagcggccgggtggccaagggccacaagatgcactaccccatggtggagtactgcacccccaccaccagcggcgaggacgtgcgggacttcgccaaggtgctgaagaacaagttccggaccaagcggtacttcgccaagcacccccggatgggctacctgcccgtgcagaccgtgctggagggcgacaacatggagacccccgtgaccctgatcaacttctggcccgtggacagcgcccccgccagcagcccccagctgagccacgacgacacccacagccggatcgagcactacgccagccggctggccgagatggagaacagcaacggcagctacctgaacgacagcatcagccccaacgagagcatcgacgacgagcacctgctgatccagcactactgccagagcctgaaccaggacagccccctgagccagccccggagc

SEQ ID NO: 40 - protein, 325 aa, synthetic construct
MLWWEEVEDCYEREDVQKKTFTKWVNAQFSKFGKQHIENLFSDLQDGRRLLDLLEGLTGQKLPKEKGSTRVHALNNVNKALRVLQNNNVDLVNIGSTDIVDGNHKLTLGLIWNIILHWQVKNVMKNIMAGLQQTNSEKILLSWVRQSTRNYPQVNVINFTTSWSDGLALNALIHSHRPDLFDWNSVVCQQSATQRLEHAFNIARYQLGIEKLLDPEDVDTTYPDKKSILMYITSLFQVLPQQVSIEAIQEVEMLPRPPKVTKEEHFQLHHQMHYSQQITVSLAQGYERTSSPKPRFKSYAYTQAAYVTTSDPTRSPFPSQHLEAP

SEQ ID NO: 41 - protein, 126 aa, synthetic construct
EDKSFGSSLMESEVNLDRYQTALEEVLSWLLSAEDTLQAQGEISNDVEVVKDQFHTHEGYMMDLTAHQGRVGNILQLGSKLIGTGKLSEDEETEVQEQMNLLNSRWECLRVASMEKQSNLHRVLMD

SEQ ID NO: 42 - protein, 105 aa, synthetic construct
LQNQKLKELNDWLTKTEERTRKMEEEPLGPDLEDLKRQVQQHKVLQEDLEQEQVRVNSLTHMVVVVDESSGDHATAALEEQLKVLGDRWANICRWTEDRWVLLQD

SEQ ID NO: 43 - protein, 118 aa, synthetic construct
ILLKWQRLTEEQCLFSAWLSEKEDAVNKIHTTGFKDQNEMLSSLQKLAVLKADLEKKKQSMGKLYSLKQDLLSTLKNKSVTQKTEAWLDNFARCWDNLVQKLEKSTAQISQAVTTTQP

SEQ ID NO: 44 - protein, 123 aa, synthetic construct
HTVREETMMVMTEDMPLEISYVPSTYLTEITHVSQALLEVEQLLNAPDLCAKDFEDLFKQEESLKNIKDSLQQSSGRIDIIHSKKTAALQSATPVERVKLQEALSQLDFQWEKVNKMYKDRQG

SEQ ID NO: 45 - protein, 113 aa, synthetic construct
RFDRSVEKWRRFHYDIKIFNQWLTEAEQFLRKTQIPENWEHAKYKWYLKELQDGIGQRQTVVRTLNATGEEIIQQSSKTDASILQEKLGSLNLRWQEVCKQLSDRKKRLEEQK

SEQ ID NO: 46 - protein, 327 aa, synthetic construct
RFDRSVEKWRRFHYDIKIFNQWLTEAEQFLRKTQIPENWEHAKYKWYLKELQDGIGQRQTVVRTLNATGEEIIQQSSKTDASILQEKLGSLNLRWQEVCKQLSDRKKRLEEQKNILSEFQRDLNEFVLWLEEADNIASIPLEPGKEQQLKEKLEQVKLLVEELPLRQGILKQLNETGGPVLVSAPISPEEQDKLENKLKQTNLQWIKVSRALPEKQGEIEAQIKDLGQLEKKLEDLEEQLNHLLLWLSPIRNQLEIYNQPNQEGPFDVKETEIAVQAKQPDVEEILSKGQHLYKEKPATQPVKRKLEDLSSEWKAVNRLLQELRAKQ

SEQ ID NO: 47 - protein, 114 aa, synthetic construct
HLSLQELLVWLQLKDDELSRQAPIGGDFPAVQKQNDVHRAFKRELKTKEPVIMSTLETVRIFLTEQPLEGLEKLYQEPRELPPEERAQNVTRLLRKQAEEVNTEWEKLNLHSAD

SEQ ID NO: 48 - protein, 121 aa, synthetic construct
WQRKIDETLERLQELQEATDELDLKLRQAEVIKGSWQPVGDLLIDSLQDHLEKVKALRGEIAPLKENVSHVNDLARQLTTLGIQLSPYNLSTLEDLNTRWKLLQVAVEDRVRQLHEAHRDF

SEQ ID NO: 49 - protein, 364 aa, synthetic construct
GPASQHFLSTSVQGPWERAISPNKVPYYINHETQTTCWDHPKMTELYQSLADLNNVRFSAYRTAMKLRRLQKALCLDLLSLSAACDALDQHNLKQNDQPMDILQIINCLTTIYDRLEQEHNNLVNVPLCVDMCLNWLLNVYDTGRTGRIRVLSFKTGIISLCKAHLEDKYRYLFKQVASSTGFCDQRRLGLLLHDSIQIPRQLGEVASFGGSNIEPSVRSCFQFANNKPEIEAALFLDWMRLEPQSMVWLPVLHRVAAAETAKHQAKCNICKECPIIGFRYRSLKHFNYDICQSCFFSGRVAKGHKMHYPMVEYCTPTTSGEDVRDFAKVLKNKFRTKRYFAKHPRMGYLPVQTVLEGDNMETP

SEQ ID NO: 50 - protein, 81 aa, synthetic construct
VTLINFWPVDSAPASSPQLSHDDTHSRIEHYASRLAEMENSNGSYLNDSISPNESIDDEHLLIQHYCQSLNQDSPLSQPRS

SEQ ID NO: 51 - protein, 63 aa, synthetic construct
PAQILISLESEERGELERILADLEEENRNLQAEYDRLKQQHEHKGLSPLPSPPEMMPTSPQSP

SEQ ID NO: 52 - protein, 132 aa, synthetic construct
RDAELIAEAKLLRQHKGRLEARMQILEDHNKQLESQLHRLRQLLEQPQAEAKVNGTTVSSPSTSLQRSDSSQPMLLRVVGSQTSDSMGEEDLLSPPQDTSTGLEEVMEQLNNSFPSSRGRNTPGKPMREDTM

SEQ ID NO: 53 - DNA, 975 bp, Homo sapiens
  source 1..975: mol_type = genomic DNA
atgctttggtgggaagaagtagaggactgttatgaaagagaagatgttcaaaagaaaacattcacaaaatgggtaaatgcacaattttctaagtttgggaagcagcatattgagaacctcttcagtgacctacaggatgggaggcgcctcctagacctcctcgaaggcctgacagggcaaaaactgccaaaagaaaaaggatccacaagagttcatgccctgaacaatgtcaacaaggcactgcgggttttgcagaacaataatgttgatttagtgaatattggaagtactgacatcgtagatggaaatcataaactgactcttggtttgatttggaatataatcctccactggcaggtcaaaaatgtaatgaaaaatatcatggctggattgcaacaaaccaacagtgaaaagattctcctgagctgggtccgacaatcaactcgtaattatccacaggttaatgtaatcaacttcaccaccagctggtctgatggcctggctttgaatgctctcatccatagtcataggccagacctatttgactggaatagtgtggtttgccagcagtcagccacacaacgactggaacatgcattcaacatcgccagatatcaattaggcatagagaaactactcgatcctgaagatgttgataccacctatccagataagaagtccatcttaatgtacatcacatcactcttccaagttttgcctcaacaagtgagcattgaagccatccaggaagtggaaatgttgccaaggccacctaaagtgactaaagaagaacattttcagttacatcatcaaatgcactattctcaacagatcacggtcagtctagcacagggatatgagagaacttcttcccctaagcctcgattcaagagctatgcctacacacaggctgcttatgtcaccacctctgaccctacacggagcccatttccttcacagcatttggaagctcct

SEQ ID NO: 54 - DNA, 975 bp, synthetic construct
  source 1..975: mol_type = other DNA
atgctgtggtgggaggaggtggaggactgctacgagcgggaggacgtgcagaagaagaccttcaccaagtgggtgaacgcccagttcagcaagttcggcaagcagcacatcgagaacctgttcagcgacctgcaggacggccggcggctgctggacctgctggagggcctgaccggccagaagctgcccaaggagaagggcagcacccgggtgcacgccctgaacaacgtgaacaaggccctgcgggtgctgcagaacaacaacgtggacctggtgaacatcggcagcaccgacatcgtggacggcaaccacaagctgaccctgggcctgatctggaacatcatcctgcactggcaggtgaagaacgtgatgaagaacatcatggccggcctgcagcagaccaacagcgagaagatcctgctgagctgggtgcggcagagcacccggaactacccccaggtgaacgtgatcaacttcaccaccagctggagcgacggcctggccctgaacgccctgatccacagccaccggcccgacctgttcgactggaacagcgtggtgtgccagcagagcgccacccagcggctggagcacgccttcaacatcgcccggtaccagctgggcatcgagaagctgctggaccccgaggacgtggacaccacctaccccgacaagaagagcatcctgatgtacatcaccagcctgttccaggtgctgccccagcaggtgagcatcgaggccatccaggaggtggagatgctgccccggccccccaaggtgaccaaggaggagcacttccagctgcaccaccagatgcactacagccagcagatcaccgtgagcctggcccagggctacgagcggaccagcagccccaagccccggttcaagagctacgcctacacccaggccgcctacgtgaccaccagcgaccccacccggagccccttccccagccagcacctggaggccccc

SEQ ID NO: 55 - DNA, 378 bp, Homo sapiens
  source 1..378: mol_type = genomic DNA
gaagacaagtcatttggcagttcattgatggagagtgaagtaaacctggaccgttatcaaacagctttagaagaagtattatcgtggcttctttctgctgaggacacattgcaagcacaaggagagatttctaatgatgtggaagtggtgaaagaccagtttcatactcatgaggggtacatgatggatttgacagcccatcagggccgggttggtaatattctacaattgggaagtaagctgattggaacaggaaaattatcagaagatgaagaaactgaagtacaagagcagatgaatctcctaaattcaagatgggaatgcctcagggtagctagcatggaaaaacaaagcaatttacatagagttttaatggat

SEQ ID NO: 56 - DNA, 378 bp, synthetic construct
  source 1..378: mol_type = other DNA
gaggacaagagcttcggcagcagcctgatggagagcgaggtgaacctggaccggtaccagaccgccctggaggaggtgctgagctggctgctgagcgccgaggacaccctgcaggcccagggcgagatcagcaacgacgtggaggtggtgaaggaccagttccacacccacgagggctacatgatggacctgaccgcccaccagggccgggtgggcaacatcctgcagctgggcagcaagctgatcggcaccggcaagctgagcgaggacgaggagaccgaggtgcaggagcagatgaacctgctgaacagccggtgggagtgcctgcgggtggccagcatggagaagcagagcaacctgcaccgggtgctgatggac

SEQ ID NO: 57 - DNA, 315 bp, Homo sapiens
  source 1..315: mol_type = genomic DNA
ctccagaatcagaaactgaaagagttgaatgactggctaacaaaaacagaagaaagaacaaggaaaatggaggaagagcctcttggacctgatcttgaagacctaaaacgccaagtacaacaacataaggtgcttcaagaagatctagaacaagaacaagtcagggtcaattctctcactcacatggtggtggtagttgatgaatctagtggagatcacgcaactgctgctttggaagaacaacttaaggtattgggagatcgatgggcaaacatctgtagatggacagaagaccgctgggttcttttacaagac

SEQ ID NO: 58 - DNA, 315 bp, synthetic construct
  source 1..315: mol_type = other DNA
ctgcagaaccagaagctgaaggagctgaacgactggctgaccaagaccgaggagcggacccggaagatggaggaggagcccctgggccccgacctggaggacctgaagcggcaggtgcagcagcacaaggtgctgcaggaggacctggagcaggagcaggtgcgggtgaacagcctgacccacatggtggtggtggtggacgagagcagcggcgaccacgccaccgccgccctggaggagcagctgaaggtgctgggcgaccggtgggccaacatctgccggtggaccgaggaccggtgggtgctgctgcaggac

SEQ ID NO: 59 - DNA, 369 bp, Homo sapiens
  source 1..369: mol_type = genomic DNA
cacactgtccgtgaagaaacgatgatggtgatgactgaagacatgcctttggaaatttcttatgtgccttctacttatttgactgaaatcactcatgtctcacaagccctattagaagtggaacaacttctcaatgctcctgacctctgtgctaaggactttgaagatctctttaagcaagaggagtctctgaagaatataaaagatagtctacaacaaagctcaggtcggattgacattattcatagcaagaagacagcagcattgcaaagtgcaacgcctgtggaaagggtgaagctacaggaagctctctcccagcttgatttccaatgggaaaaagttaacaaaatgtacaaggaccgacaaggg

SEQ ID NO: 60 - DNA, 369 bp, synthetic construct
  source 1..369: mol_type = other DNA
cacaccgtgcgggaggagaccatgatggtgatgaccgaggacatgcccctggagatcagctacgtgcccagcacctacctgaccgagatcacccacgtgagccaggccctgctggaggtggagcagctgctgaacgcccccgacctgtgcgccaaggacttcgaggacctgttcaagcaggaggagagcctgaagaacatcaaggacagcctgcagcagagcagcggccggatcgacatcatccacagcaagaagaccgccgccctgcagagcgccacccccgtggagcgggtgaagctgcaggaggccctgagccagctggacttccagtgggagaaggtgaacaagatgtacaaggaccggcagggc

SEQ ID NO: 61 - DNA, 339 bp, Homo sapiens
  source 1..339: mol_type = genomic DNA
cgatttgacagatctgttgagaaatggcggcgttttcattatgatataaagatatttaatcagtggctaacagaagctgaacagtttctcagaaagacacaaattcctgagaattgggaacatgctaaatacaaatggtatcttaaggaactccaggatggcattgggcagcggcaaactgttgtcagaacattgaatgcaactggggaagaaataattcagcaatcctcaaaaacagatgccagtattctacaggaaaaattgggaagcctgaatctgcggtggcaggaggtctgcaaacagctgtcagacagaaaaaagaggctagaagaacaaaag

SEQ ID NO: 62 - DNA, 339 bp, synthetic construct
  source 1..339: mol_type = other DNA
cggttcgaccggagcgtggagaagtggcggcggttccactacgacatcaagatcttcaaccagtggctgaccgaggccgagcagttcctgcggaagacccagatccccgagaactgggagcacgccaagtacaagtggtacctgaaggagctgcaggacggcatcggccagcggcagaccgtggtgcggaccctgaacgccaccggcgaggagatcatccagcagagcagcaagaccgacgccagcatcctgcaggagaagctgggcagcctgaacctgcggtggcaggaggtgtgcaagcagctgagcgaccggaagaagcggctggaggagcagaag

SEQ ID NO: 63 - DNA, 981 bp, Homo sapiens
  source 1..981: mol_type = genomic DNA
cgatttgacagatctgttgagaaatggcggcgttttcattatgatataaagatatttaatcagtggctaacagaagctgaacagtttctcagaaagacacaaattcctgagaattgggaacatgctaaatacaaatggtatcttaaggaactccaggatggcattgggcagcggcaaactgttgtcagaacattgaatgcaactggggaagaaataattcagcaatcctcaaaaacagatgccagtattctacaggaaaaattgggaagcctgaatctgcggtggcaggaggtctgcaaacagctgtcagacagaaaaaagaggctagaagaacaaaagaatatcttgtcagaatttcaaagagatttaaatgaatttgttttatggttggaggaagcagataacattgctagtatcccacttgaacctggaaaagagcagcaactaaaagaaaagcttgagcaagtcaagttactggtggaagagttgcccctgcgccagggaattctcaaacaattaaatgaaactggaggacccgtgcttgtaagtgctcccataagcccagaagagcaagataaacttgaaaataagctcaagcagacaaatctccagtggataaaggtttccagagctttacctgagaaacaaggagaaattgaagctcaaataaaagaccttgggcagcttgaaaaaaagcttgaagaccttgaagagcagttaaatcatctgctgctgtggttatctcctattaggaatcagttggaaatttataaccaaccaaaccaagaaggaccatttgacgttaaggaaactgaaatagcagttcaagctaaacaaccggatgtggaagagattttgtctaaagggcagcatttgtacaaggaaaaaccagccactcagccagtgaagaggaagttagaagatctgagctctgagtggaaggcggtaaaccgtttacttcaagagctgagggcaaagcag

SEQ ID NO: 64 - DNA, 342 bp, Homo sapiens
  source 1..342: mol_type = genomic DNA
cacctttctctgcaggaacttctggtgtggctacagctgaaagatgatgaattaagccggcaggcacctattggaggcgactttccagcagttcagaagcagaacgatgtacatagggccttcaagagggaattgaaaactaaagaacctgtaatcatgagtactcttgagactgtacgaatatttctgacagagcagcctttggaaggactagagaaactctaccaggagcccagagagctgcctcctgaggagagagcccagaatgtcactcggcttctacgaaagcaggctgaggaggtcaatactgagtgggaaaaattgaacctgcactccgctgac

SEQ ID NO: 65 - DNA, 342 bp, synthetic construct
  source 1..342: mol_type = other DNA
cacctgagcctgcaggagctgctggtgtggctgcagctgaaggacgacgagctgagccggcaggcccccatcggcggcgacttccccgccgtgcagaagcagaacgacgtgcaccgggccttcaagcgggagctgaagaccaaggagcccgtgatcatgagcaccctggagaccgtgcggatcttcctgaccgagcagcccctggagggcctggagaagctgtaccaggagccccgggagctgccccccgaggagcgggcccagaacgtgacccggctgctgcggaagcaggccgaggaggtgaacaccgagtgggagaagctgaacctgcacagcgccgac

SEQ ID NO: 66 - DNA, 363 bp, Homo sapiens
  source 1..363: mol_type = genomic DNA
tggcagagaaaaatagatgagacccttgaaagactccgggaacttcaagaggccacggatgagctggacctcaagctgcgccaagctgaggtgatcaagggatcctggcagcccgtgggcgatctcctcattgactctctccaagatcacctcgagaaagtcaaggcacttcgaggagaaattgcgcctctgaaagagaacgtgagccacgtcaatgaccttgctcgccagcttaccactttgggcattcagctctcaccgtataacctcagcactctggaagacctgaacaccagatggaagcttctgcaggtggccgtcgaggaccgagtcaggcagctgcatgaagcccacagggacttt

SEQ ID NO: 67 - DNA, 363 bp, synthetic construct
  source 1..363: mol_type = other DNA
tggcagcggaagatcgacgagaccctggagcggctgcaggagctgcaggaggccaccgacgagctggacctgaagctgcggcaggccgaggtgatcaagggcagctggcagcccgtgggcgacctgctgatcgacagcctgcaggaccacctggagaaggtgaaggccctgcggggcgagatcgcccccctgaaggagaacgtgagccacgtgaacgacctggcccggcagctgaccaccctgggcatccagctgagcccctacaacctgagcaccctggaggacctgaacacccggtggaagctgctgcaggtggccgtggaggaccgggtgcggcagctgcacgaggcccaccgggacttc

SEQ ID NO: 68 - DNA, 1092 bp, Homo sapiens
  source 1..1092: mol_type = genomic DNA
ggtccagcatctcagcactttctttccacgtctgtccagggtccctgggagagagccatctcgccaaacaaagtgccctactatatcaaccacgagactcaaacaacttgctgggaccatcccaaaatgacagagctctaccagtctttagctgacctgaataatgtcagattctcagcttataggactgccatgaaactccgaagactgcagaaggccctttgcttggatctcttgagcctgtcagctgcatgtgatgccttggaccagcacaacctcaagcaaaatgaccagcccatggatatcctgcagattattaattgtttgaccactatttatgaccgcctggagcaagagcacaacaatttggtcaacgtccctctctgcgtggatatgtgtctgaactggctgctgaatgtttatgatacgggacgaacagggaggatccgtgtcctgtcttttaaaactggcatcatttccctgtgtaaagcacatttggaagacaagtacagataccttttcaagcaagtggcaagttcaacaggattttgtgaccagcgcaggctgggcctccttctgcatgattctatccaaattccaagacagttgggtgaagttgcatcctttgggggcagtaacattgagccaagtgtccggagctgcttccaatttgctaataataagccagagatcgaagcggccctcttcctagactggatgagactggaaccccagtccatggtgtggctgcccgtcctgcacagagtggctgctgcagaaactgccaagcatcaggccaaatgtaacatctgcaaagagtgtccaatcattggattcaggtacaggagtctaaagcactttaattatgacatctgccaaagctgctttttttctggtcgagttgcaaaaggccataaaatgcactatcccatggtggaatattgcactccgactacatcaggagaagatgttcgagactttgccaaggtactaaaaaacaaatttcgaaccaaaaggtattttgcgaagcatccccgaatgggctacctgccagtgcagactgtcttagagggggacaacatggaaactccc

SEQ ID NO: 69 - DNA, 1092 bp, synthetic construct
  source 1..1092: mol_type = other DNA
ggccccgccagccagcacttcctgagcaccagcgtgcagggcccctgggagcgggccatcagccccaacaaggtgccctactacatcaaccacgagacccagaccacctgctgggaccaccccaagatgaccgagctgtaccagagcctggccgacctgaacaacgtgcggttcagcgcctaccggaccgccatgaagctgcggcggctgcagaaggccctgtgcctggacctgctgagcctgagcgccgcctgcgacgccctggaccagcacaacctgaagcagaacgaccagcccatggacatcctgcagatcatcaactgcctgaccaccatctacgaccggctggagcaggagcacaacaacctggtgaacgtgcccctgtgcgtggacatgtgcctgaactggctgctgaacgtgtacgacaccggccggaccggccggatccgggtgctgagcttcaagaccggcatcatcagcctgtgcaaggcccacctggaggacaagtaccggtacctgttcaagcaggtggccagcagcaccggcttctgcgaccagcggcggctgggcctgctgctgcacgacagcatccagatcccccggcagctgggcgaggtggccagcttcggcggcagcaacatcgagcccagcgtgcggagctgcttccagttcgccaacaacaagcccgagatcgaggccgccctgttcctggactggatgcggctggagccccagagcatggtgtggctgcccgtgctgcaccgggtggccgccgccgagaccgccaagcaccaggccaagtgcaacatctgcaaggagtgccccatcatcggcttccggtaccggagcctgaagcacttcaactacgacatctgccagagctgcttcttcagcggccgggtggccaagggccacaagatgcactaccccatggtggagtactgcacccccaccaccagcggcgaggacgtgcgggacttcgccaaggtgctgaagaacaagttccggaccaagcggtacttcgccaagcacccccggatgggctacctgcccgtgcagaccgtgctggagggcgacaacatggagaccccc

SEQ ID NO: 70 - DNA, 243 bp, Homo sapiens
  source 1..243: mol_type = genomic DNA
gttactctgatcaacttctggccagtagattctgcgcctgcctcgtcccctcagctttcacacgatgatactcattcacgcattgaacattatgctagcaggctagcagaaatggaaaacagcaatggatcttatctaaatgatagcatctctcctaatgagagcatagatgatgaacatttgttaatccagcattactgccaaagtttgaaccaggactcccccctgagccagcctcgtagt

SEQ ID NO: 71 - DNA, 243 bp, synthetic construct
  source 1..243: mol_type = other DNA
gtgaccctgatcaacttctggcccgtggacagcgcccccgccagcagcccccagctgagccacgacgacacccacagccggatcgagcactacgccagccggctggccgagatggagaacagcaacggcagctacctgaacgacagcatcagccccaacgagagcatcgacgacgagcacctgctgatccagcactactgccagagcctgaaccaggacagccccctgagccagccccggagc

SEQ ID NO: 72 - DNA, 189 bp, Homo sapiens
  source 1..189: mol_type = genomic DNA
cctgcccagatcttgatttccttagagagtgaggaaagaggggagctagagagaatcctagcagatcttgaggaagaaaacaggaatctgcaagcagaatatgaccgtctaaagcagcagcacgaacataaaggcctgtccccactgccgtcccctcctgaaatgatgcccacctctccccagagtccc

SEQ ID NO: 73 - DNA, 189 bp, synthetic construct
  source 1..189: mol_type = other DNA
cccgcccagatcctgatcagcctggagagcgaggagcggggcgagctggagcggatcctggccgacctggaggaggagaaccggaacctgcaggccgagtacgaccggctgaagcagcagcacgagcacaagggcctgagccccctgcccagcccccccgagatgatgcccaccagcccccagagcccc

SEQ ID NO: 74 - DNA, 396 bp, Homo sapiens
  source 1..396: mol_type = genomic DNA
cgggatgctgagctcattgctgaggccaagctactgcgtcaacacaaaggccgcctggaagccaggatgcaaatcctggaagaccacaataaacagctggagtcacagttacacaggctaaggcagctgctggagcaaccccaggcagaggccaaagtgaatggcacaacggtgtcctctccttctacctctctacagaggtccgacagcagtcagcctatgctgctccgagtggttggcagtcaaacttcggactccatgggtgaggaagatcttctcagtcctccccaggacacaagcacagggttagaggaggtgatggagcaactcaacaactccttccctagttcaagaggaagaaatacccctggaaagccaatgagagaggacacaatg

SEQ ID NO: 75 - DNA, 396 bp, synthetic construct
  source 1..396: mol_type = other DNA
cgggacgccgagctgatcgccgaggccaagctgctgcggcagcacaagggccggctggaggcccggatgcagatcctggaggaccacaacaagcagctggagagccagctgcaccggctgcggcagctgctggagcagccccaggccgaggccaaggtgaacggcaccaccgtgagcagccccagcaccagcctgcagcggagcgacagcagccagcccatgctgctgcgggtggtgggcagccagaccagcgacagcatgggcgaggaggacctgctgagccccccccaggacaccagcaccggcctggaggaggtgatggagcagctgaacaacagcttccccagcagccggggccggaacacccccggcaagcccatgcgggaggacaccatg

SEQ ID NO: 76 - DNA, 106 bp, synthetic construct
  source 1..106: mol_type = other DNA
tctagaaaatctgaaaggcatagccccatatatcagtgatataaatagaacctgcagcaggctctggtaaatgatgactacaaggtggactgggaggcagcccggc

SEQ ID NO: 77 - DNA, 278 bp, synthetic construct
  source 1..278: mol_type = other DNA
aggaggggcaaacccgctagggagacactccatatacggcccggcccgcgttacctgggaccgggccaacccgctccttctttggtcaacgcaggggacccgggcgggggcccaggccgcgaaccggccgagggagggggctctagtgcccaacacccaaatatggctcgagaagggcagcgacattcctgcggggtggcgcggagggaatgcccgcgggctatataaaacctgagcagagggacaagcggccaccgcagcggacagcgccaccatgg

SEQ ID NO: 78 - DNA, 380 bp, synthetic construct
  source 1..380: mol_type = other DNA
tctagaaaatctgaaaggcatagccccatatatcagtgatataaatagaacctgcagcaggctctggtaaatgatgactacaaggtggactgggaggcagcccggcaggaggggcaaacccgctagggagacactccatatacggcccggcccgcgttacctgggaccgggccaacccgctccttctttggtcaacgcaggggacccgggcgggggcccaggccgcgaaccggccgagggagggggctctagtgcccaacacccaaatatggctcgagaagggcagcgacattcctgcggggtggcgcggagggaatgcccgcgggctatataaaacctgagcagagggacaagcggccaccgcagcggacagcgccacc

SEQ ID NO: 79 - DNA, 205 bp, synthetic construct
  source 1..205: mol_type = other DNA
tctagaaaatctgaaaggcatagccccatatatcagtgatataaatagaacctgcagcaggctctggtaaatgatgactacaaggtggactgggaggcagcccggcaatctgaaaggcatagccccatatatcagtgatataaatagaacctgcagcaggctctggtaaatgatgactacaaggtggactgggaggcagcccggc

SEQ ID NO: 80 - DNA, 479 bp, synthetic construct
  source 1..479: mol_type = other DNA
tctagaaaatctgaaaggcatagccccatatatcagtgatataaatagaacctgcagcaggctctggtaaatgatgactacaaggtggactgggaggcagcccggcaatctgaaaggcatagccccatatatcagtgatataaatagaacctgcagcaggctctggtaaatgatgactacaaggtggactgggaggcagcccggcaggaggggcaaacccgctagggagacactccatatacggcccggcccgcgttacctgggaccgggccaacccgctccttctttggtcaacgcaggggacccgggcgggggcccaggccgcgaaccggccgagggagggggctctagtgcccaacacccaaatatggctcgagaagggcagcgacattcctgcggggtggcgcggagggaatgcccgcgggctatataaaacctgagcagagggacaagcggccaccgcagcggacagcgccacc

SEQ ID NO: 81 - protein, 1233 aa, synthetic construct
MAKYGEHEASPDNGQNEFSDIIKSRSDEHNDVQKKTFTKWINARFSKSGKPPINDMFTDLKDGRKLLDLLEGLTGTSLPKERGSTRVHALNNVNRVLQVLHQNNVELVNIGGTDIVDGNHKLTLGLLWSIILHWQVKDVMKDVMSDLQQTNSEKILLSWVRQTTRPYSQVNVLNFTTSWTDGLAFNAVLHRHKPDLFSWDKVVKMSPIERLEHAFSKAQTYLGIEKLLDPEDVAVQLPDKKSIIMYLTSLFEVLPQQVTIDAIREVETLPRKYKKECEEEAINIQSTAPEEEHESPRAETPSTVTEVDMDLDSYQIALEEVLTWLLSAEDTFQEQDDISDDVEEVKDQFATHEAFMMELTAHQSSVGSVLQAGNQLITQGTLSDEEEFEIQEQMTLLNARWEALRVESMDRQSRLHDVLMAASARSVEKWRRFHYDIKIFNQWLTEAEQFLRKTQIPENWEHAKYKWYLKELQDGIGQRQTVVRTLNATGEEIIQQSSKTDASILQEKLGSLNLRWQEVCKQLSDRKKRLEEQKNILSEFQRDLNEFVLWLEEADNIASIPLEPGKEQQLKEKLEQVKLLVEELPLRQGILKQLNETGGPVLVSAPISPEEQDKLENKLKQTNLQWIKVSRALPEKQGEIEAQIKDLGQLEKKLEDLEEQLNHLLLWLSPIRNQLEIYNQPNQEGPFDVKETEIAVQAKQPDVEEILSKGQHLYKEKPATQPVKRKLEDLSSEWKAVNRLLQELRAKQWQRKIDETLERLQELQEATDELDLKLRQAEVIKGSWQPVGDLLIDSLQDHLEKVKALRGEIAPLKENVSHVNDLARQLTTLGIQLSPYNLSTLEDLNTRWKLLQVAVEDRVRQLHEAHRDFGPASQHFLSTSVQGPWERAISPNKVPYYINHETQTTCWDHPKMTELYQSLADLNNVRFSAYRTAMKLRRLQKALCLDLLSLSAACDALDQHNLKQNDQPMDILQIINCLTTIYDRLEQEHNNLVNVPLCVDMCLNWLLNVYDTGRTGRIRVLSFKTGIISLCKAHLEDKYRYLFKQVASSTGFCDQRRLGLLLHDSIQIPRQLGEVASFGGSNIEPSVRSCFQFANNKPEIEAALFLDWMRLEPQSMVWLPVLHRVAAAETAKHQAKCNICKECPIIGFRYRSLKHFNYDICQSCFFSGRVAKGHKMHYPMVEYCTPTTSGEDVRDFAKVLKNKFRTKRYFAKHPRMGYLPVQTVLEGDNMETP

SEQ ID NO: 82 - protein, 1256 aa, synthetic construct
MAKYGEHEASPDNGQNEFSDIIKSRSDEHNDVQKKTFTKWINARFSKSGKPPINDMFTDLKDGRKLLDLLEGLTGTSLPKERGSTRVHALNNVNRVLQVLHQNNVELVNIGGTDIVDGNHKLTLGLLWSIILHWQVKDVMKDVMSDLQQTNSEKILLSWVRQTTRPYSQVNVLNFTTSWTDGLAFNAVLHRHKPDLFSWDKVVKMSPIERLEHAFSKAQTYLGIEKLLDPEDVAVQLPDKKSIIMYLTSLFEVLPQQVTIDAIREVETLPRKYKKECEEEAINIQSTAPEEEHESPRAETPSTVTEVDMDLDSYQIALEEVLTWLLSAEDTFQEQDDISDDVEEVKDQFATHEAFMMELTAHQSSVGSVLQAGNQLITQGTLSDEEEFEIQEQMTLLNARWEALRVESMDRQSRLHDVLMAASARSVEKWRRFHYDIKIFNQWLTEAEQFLRKTQIPENWEHAKYKWYLKELQDGIGQRQTVVRTLNATGEEIIQQSSKTDASILQEKLGSLNLRWQEVCKQLSDRKKRLEEQKNILSEFQRDLNEFVLWLEEADNIASIPLEPGKEQQLKEKLEQVKLLVEELPLRQGILKQLNETGGPVLVSAPISPEEQDKLENKLKQTNLQWIKVSRALPEKQGEIEAQIKDLGQLEKKLEDLEEQLNHLLLWLSPIRNQLEIYNQPNQEGPFDVKETEIAVQAKQPDVEEILSKGQHLYKEKPATQPVKRKLEDLSSEWKAVNRLLQELRAKQGPASQHFLSTSVQGPWERAISPNKVPYYINHETQTTCWDHPKMTELYQSLADLNNVRFSAYRTAMKLRRLQKALCLDLLSLSAACDALDQHNLKQNDQPMDILQIINCLTTIYDRLEQEHNNLVNVPLCVDMCLNWLLNVYDTGRTGRIRVLSFKTGIISLCKAHLEDKYRYLFKQVASSTGFCDQRRLGLLLHDSIQIPRQLGEVASFGGSNIEPSVRSCFQFANNKPEIEAALFLDWMRLEPQSMVWLPVLHRVAAAETAKHQAKCNICKECPIIGFRYRSLKHFNYDICQSCFFSGRVAKGHKMHYPMVEYCTPTTSGEDVRDFAKVLKNKFRTKRYFAKHPRMGYLPVQTVLEGDNMETPVTLINFWPVDSAPASSPQLSHDDTHSRIEHYASRLAEMENSNGSYLNDSISPNESIDDEHLLIQHYCQSLNQDSPLSQPRSPAQILISLESEERGELERILADLEEENRNLQAEYDRLKQQHEHKGLSPLPSPPEMMPTSPQSP

SEQ ID NO: 83 - protein, 1314 aa, synthetic construct
MAKYGEHEASPDNGQNEFSDIIKSRSDEHNDVQKKTFTKWINARFSKSGKPPINDMFTDLKDGRKLLDLLEGLTGTSLPKERGSTRVHALNNVNRVLQVLHQNNVELVNIGGTDIVDGNHKLTLGLLWSIILHWQVKDVMKDVMSDLQQTNSEKILLSWVRQTTRPYSQVNVLNFTTSWTDGLAFNAVLHRHKPDLFSWDKVVKMSPIERLEHAFSKAQTYLGIEKLLDPEDVAVQLPDKKSIIMYLTSLFEVLPQQVTIDAIREVETLPRKYKKECEEEAINIQSTAPEEEHESPRAETPSTVTEVDMDLDSYQIALEEVLTWLLSAEDTFQEQDDISDDVEEVKDQFATHEAFMMELTAHQSSVGSVLQAGNQLITQGTLSDEEEFEIQEQMTLLNARWEALRVESMDRQSRLHDVLMAASARSVEKWRRFHYDIKIFNQWLTEAEQFLRKTQIPENWEHAKYKWYLKELQDGIGQRQTVVRTLNATGEEIIQQSSKTDASILQEKLGSLNLRWQEVCKQLSDRKKRLEEQKNILSEFQRDLNEFVLWLEEADNIASIPLEPGKEQQLKEKLEQVKLLVEELPLRQGILKQLNETGGPVLVSAPISPEEQDKLENKLKQTNLQWIKVSRALPEKQGEIEAQIKDLGQLEKKLEDLEEQLNHLLLWLSPIRNQLEIYNQPNQEGPFDVKETEIAVQAKQPDVEEILSKGQHLYKEKPATQPVKRKLEDLSSEWKAVNRLLQELRAKQWQRKIDETLERLQELQEATDELDLKLRQAEVIKGSWQPVGDLLIDSLQDHLEKVKALRGEIAPLKENVSHVNDLARQLTTLGIQLSPYNLSTLEDLNTRWKLLQVAVEDRVRQLHEAHRDFGPASQHFLSTSVQGPWERAISPNKVPYYINHETQTTCWDHPKMTELYQSLADLNNVRFSAYRTAMKLRRLQKALCLDLLSLSAACDALDQHNLKQNDQPMDILQIINCLTTIYDRLEQEHNNLVNVPLCVDMCLNWLLNVYDTGRTGRIRVLSFKTGIISLCKAHLEDKYRYLFKQVASSTGFCDQRRLGLLLHDSIQIPRQLGEVASFGGSNIEPSVRSCFQFANNKPEIEAALFLDWMRLEPQSMVWLPVLHRVAAAETAKHQAKCNICKECPIIGFRYRSLKHFNYDICQSCFFSGRVAKGHKMHYPMVEYCTPTTSGEDVRDFAKVLKNKFRTKRYFAKHPRMGYLPVQTVLEGDNMETPVTLINFWPVDSAPASSPQLSHDDTHSRIEHYASRLAEMENSNGSYLNDSISPNESIDDEHLLIQHYCQSLNQDSPLSQPRS

SEQ ID NO: 84 - protein, 1307 aa, synthetic construct
MAKYGEHEASPDNGQNEFSDIIKSRSDEHNDVQKKTFTKWINARFSKSGKPPINDMFTDLKDGRKLLDLLEGLTGTSLPKERGSTRVHALNNVNRVLQVLHQNNVELVNIGGTDIVDGNHKLTLGLLWSIILHWQVKDVMKDVMSDLQQTNSEKILLSWVRQTTRPYSQVNVLNFTTSWTDGLAFNAVLHRHKPDLFSWDKVVKMSPIERLEHAFSKAQTYLGIEKLLDPEDVAVQLPDKKSIIMYLTSLFEVLPQQVTIDAIREVETLPRKYKKECEEEAINIQSTAPEEEHESPRAETPSTVTEVDMDLDSYQIALEEVLTWLLSAEDTFQEQDDISDDVEEVKDQFATHEAFMMELTAHQSSVGSVLQAGNQLITQGTLSDEEEFEIQEQMTLLNARWEALRVESMDRQSRLHDVLMAASASSDQWKRLHLSLQELLVWLQLKDDELSRQAPIGGDFPAVQKQNDVHRAFKRELKTKEPVIMSTLETVRIFLTEQPLEGLEKLYQEPRELPPEERAQNVTRLLRKQAEEVNTEWEKLNLHSADWQRKIDETLERLQELQEATDELDLKLRQAEVIKGSWQPVGDLLIDSLQDHLEKVKALRGEIAPLKENVSHVNDLARQLTTLGIQLSPYNLSTLEDLNTRWKLLQVAVEDRVRQLHEAHRDFGPASQHFLSTSVQGPWERAISPNKVPYYINHETQTTCWDHPKMTELYQSLADLNNVRFSAYRTAMKLRRLQKALCLDLLSLSAACDALDQHNLKQNDQPMDILQIINCLTTIYDRLEQEHNNLVNVPLCVDMCLNWLLNVYDTGRTGRIRVLSFKTGIISLCKAHLEDKYRYLFKQVASSTGFCDQRRLGLLLHDSIQIPRQLGEVASFGGSNIEPSVRSCFQFANNKPEIEAALFLDWMRLEPQSMVWLPVLHRVAAAETAKHQAKCNICKECPIIGFRYRSLKHFNYDICQSCFFSGRVAKGHKMHYPMVEYCTPTTSGEDVRDFAKVLKNKFRTKRYFAKHPRMGYLPVQTVLEGDNMETPVTLINFWPVDSAPASSPQLSHDDTHSRIEHYASRLAEMENSNGSYLNDSISPNESIDDEHLLIQHYCQSLNQDSPLSQPRSPAQILISLESEERGELERILADLEEENRNLQAEYDRLKQQHEHKGLSPLPSPPEMMPTSPQSPRDAELIAEAKLLRQHKGRLEARMQILEDHNKQLESQLHRLRQLLEQPQAEAKVNGTTVSSPSTSLQRSDSSQPMLLRVVGSQTSDSMGEEDLLSPPQDTSTGLEEVMEQLNNSFPSSRGRNTPGKPMREDTM

SEQ ID NO: 85 - DNA, 3699 bp, Homo sapiens
  source 1..3699: mol_type = genomic DNA
atggccaagtatggagaacatgaagccagtcctgacaatgggcagaacgaattcagtgatatcattaagtccagatctgatgaacacaatgacgtacagaagaaaacctttaccaaatggataaatgctcgattttcaaagagtgggaaaccacccatcaatgatatgttcacagacctcaaagatggaaggaagctattggatcttctagaaggcctcacaggaacatcactgccaaaggaacgtggttccacaagggtacatgccttaaataacgtcaacagagtgctgcaggttttacatcagaacaatgtggaattagtgaatatagggggaactgacattgtggatggaaatcacaaactgactttggggttactttggagcatcattttgcactggcaggtgaaagatgtcatgaaggatgtcatgtcggacctgcagcagacgaacagtgagaagatcctgctcagctgggtgcgtcagaccaccaggccctacagccaagtcaacgtcctcaacttcaccaccagctggacagatggactcgcctttaatgctgtcctccaccgacataaacctgatctcttcagctgggataaagttgtcaaaatgtcaccaattgagagacttgaacatgccttcagcaaggctcaaacttatttgggaattgaaaagctgttagatcctgaagatgttgccgttcagcttcctgacaagaaatccataattatgtatttaacatctttgtttgaggtgctacctcagcaagtcaccatagacgccatccgtgaggtagagacactcccaaggaaatataaaaaagaatgtgaagaagaggcaattaatatacagagtacagcgcctgaggaggagcatgagagtccccgagctgaaactcccagcactgtcactgaggttgacatggatctggacagctatcagattgcgttggaggaagtgctgacctggttgctttctgctgaggacactttccaggagcaggatgatatttctgatgatgttgaagaagtcaaagaccagtttgcaacccatgaagcttttatgatggaactgactgcacaccagagcagtgtgggcagcgtcctgcaggcaggcaaccaactgataacacaaggaactctgtcagacgaagaagaatttgagattcaggaacagatgaccctgctgaatgctagatgggaggctcttagggtggagagtatggacagacagtcccggctgcacgatgtgctgatggccgctagcgccagatctgttgagaaatggcggcgttttcattatgatataaagatatttaatcagtggctaacagaagctgaacagtttctcagaaagacacaaattcctgagaattgggaacatgctaaatacaaatggtatcttaaggaactccaggatggcattgggcagcggcaaactgttgtcagaacattgaatgcaactggggaagaaataattcagcaatcctcaaaaacagatgccagtattctacaggaaaaattgggaagcctgaatctgcggtggcaggaggtctgcaaacagctgtcagacagaaaaaagaggctagaagaacaaaagaatatcttgtcagaatttcaaagagatttaaatgaatttgttttatggttggaggaagcagataacattgctagtatcccacttgaacctggaaaagagcagcaactaaaagaaaagcttgagcaagtcaagttactggtggaagagttgcccctgcgccagggaattctcaaacaattaaatgaaactggaggacccgtgcttgtaagtgctcccataagcccagaagagcaagataaacttgaaaataagctcaagcagacaaatctccagtggataaaggtttccagagctttacctgagaaacaaggagaaattgaagctcaaataaaagaccttgggcagcttgaaaaaaagcttgaagaccttgaagagcagttaaatcatctgctgctgtggttatctcctattaggaatcagttggaaatttataaccaaccaaaccaagaaggaccatttgacgttaaggaaactgaaatagcagttcaagctaaacaaccggatgtggaagagattttgtctaaagggcagcatttgtacaaggaaaaaccagccactcagccagtgaagaggaagttagaagatctgagctctgagtggaaggcggtaaaccgtttacttcaagagctgagggcaaagcagtggcagagaaaaatagatgagacccttgaaagactccgggaacttcaagaggccacggatgagctggacctcaagctgcgccaagctgaggtgatcaagggatcctggcagcccgtgggcgatctcctcattgactctctccaagatcacctcgagaaagtcaaggcacttcgaggagaaattgcgcctctgaaagagaacgtgagccacgtcaatgaccttgctcgccagcttaccactttgggcattcagctctcaccgtataacctcagcactctggaagacctgaacaccagatggaagcttctgcaggtggccgtcgaggaccgagtcaggcagctgcatgaagcccacagggactttggtccagcatctcagcactttctttccacgtctgtccagggtccctgggagagagccatctcgccaaacaaagtgccctactatatcaaccacgagactcaaacaacttgctgggaccatcccaaaatgacagagctctaccagtctttagctgacctgaataatgtcagattctcagcttataggactgccatgaaactccgaagactgcagaaggccctttgcttggatctcttgagcctgtcagctgcatgtgatgccttggaccagcacaacctcaagcaaaatgaccagcccatggatatcctgcagattattaattgtttgaccactatttatgaccgcctggagcaagagcacaacaatttggtcaacgtccctctctgcgtggatatgtgtctgaactggctgctgaatgtttatgatacgggacgaacagggaggatccgtgtcctgtcttttaaaactggcatcatttccctgtgtaaagcacatttggaagacaagtacagataccttttcaagcaagtggcaagttcaacaggattttgtgaccagcgcaggctgggcctccttctgcatgattctatccaaattccaagacagttgggtgaagttgcatcctttgggggcagtaacattgagccaagtgtccggagctgcttccaatttgctaataataagccagagatcgaagcggccctcttcctagactggatgagactggaaccccagtccatggtgtggctgcccgtcctgcacagagtggctgctgcagaaactgccaagcatcaggccaaatgtaacatctgcaaagagtgtccaatcattggattcaggtacaggagtctaaagcactttaattatgacatctgccaaagctgctttttttctggtcgagttgcaaaaggccataaaatgcactatcccatggtggaatattgcactccgactacatcaggagaagatgttcgagactttgccaaggtactaaaaaacaaatttcgaaccaaaaggtattttgcgaagcatccccgaatgggctacctgccagtgcagactgtcttagagggggacaacatggaaactccc

SEQ ID NO: 86 - DNA, 3699 bp, synthetic construct
  source 1..3699: mol_type = other DNA
atggccaagtacggcgagcacgaggccagccccgacaacggccagaacgagttcagcgacatcatcaagagccggagcgacgagcacaacgacgtgcagaagaagaccttcaccaagtggatcaacgcccggttcagcaagagcggcaagccccccatcaacgacatgttcaccgacctgaaggacggccggaagctgctggacctgctggagggcctgaccggcaccagcctgcccaaggagcggggcagcacccgggtgcacgccctgaacaacgtgaaccgggtgctgcaggtgctgcaccagaacaacgtggagctggtgaacatcggcggcaccgacatcgtggacggcaaccacaagctgaccctgggcctgctgtggagcatcatcctgcactggcaggtgaaggacgtgatgaaggacgtgatgagcgacctgcagcagaccaacagcgagaagatcctgctgagctgggtgcggcagaccacccggccctacagccaggtgaacgtgctgaacttcaccaccagctggaccgacggcctggccttcaacgccgtgctgcaccggcacaagcccgacctgttcagctgggacaaggtggtgaagatgagccccatcgagcggctggagcacgccttcagcaaggcccagacctacctgggcatcgagaagctgctggaccccgaggacgtggccgtgcagctgcccgacaagaagagcatcatcatgtacctgaccagcctgttcgaggtgctgccccagcaggtgaccatcgacgccatccgggaggtggagaccctgccccggaagtacaagaaggagtgcgaggaggaggccatcaacatccagagcaccgcccccgaggaggagcacgagagcccccgggccgagacccccagcaccgtgaccgaggtggacatggacctggacagctaccagatcgccctggaggaggtgctgacctggctgctgagcgccgaggacaccttccaggagcaggacgacatcagcgacgacgtggaggaggtgaaggaccagttcgccacccacgaggccttcatgatggagctgaccgcccaccagagcagcgtgggcagcgtgctgcaggccggcaaccagctgatcacccagggcaccctgagcgacgaggaggagttcgagatccaggagcagatgaccctgctgaacgcccggtgggaggccctgcgggtggagagcatggaccggcagagccggctgcacgacgtgctgatggccgctagcgcccggagcgtggagaagtggcggcggttccactacgacatcaagatcttcaaccagtggctgaccgaggccgagcagttcctgcggaagacccagatccccgagaactgggagcacgccaagtacaagtggtacctgaaggagctgcaggacggcatcggccagcggcagaccgtggtgcggaccctgaacgccaccggcgaggagatcatccagcagagcagcaagaccgacgccagcatcctgcaggagaagctgggcagcctgaacctgcggtggcaggaggtgtgcaagcagctgagcgaccggaagaagcggctggaggagcagaagaacatcctgagcgagttccagcgggacctgaacgagttcgtgctgtggctggaggaggccgacaacatcgccagcatccccctggagcccggcaaggagcagcagctgaaggagaagctggagcaggtgaagctgctggtggaggagctgcccctgcggcagggcatcctgaagcagctgaacgagaccggcggccccgtgctggtgagcgcccccatcagccccgaggagcaggacaagctggagaacaagctgaagcagaccaacctgcagtggatcaaggtgagccgggccctgcccgagaagcagggcgagatcgaggcccagatcaaggacctgggccagctggagaagaagctggaggacctggaggagcagctgaaccacctgctgctgtggctgagccccatccggaaccagctggagatctacaaccagcccaaccaggagggccccttcgacgtgaaggagaccgagatcgccgtgcaggccaagcagcccgacgtggaggagatcctgagcaagggccagcacctgtacaaggagaagcccgccacccagcccgtgaagcggaagctggaggacctgagcagcgagtggaaggccgtgaaccggctgctgcaggagctgcgggccaagcagtggcagagaaaaatagatgagacccttgaaagactccgggaacttcaagaggccacggatgagctggacctcaagctgcgccaagctgaggtgatcaagggatcctggcagcccgtgggcgatctcctcattgactctctccaagatcacctcgagaaagtcaaggcacttcgaggagaaattgcgcctctgaaagagaacgtgagccacgtcaatgaccttgctcgccagcttaccactttgggcattcagctctcaccgtataacctcagcactctggaagacctgaacaccagatggaagcttctgcaggtggccgtcgaggaccgagtcaggcagctgcatgaagcccacagggactttggtccagcatctcagcactttctttccacgtctgtccagggtccctgggagagagccatctcgccaaacaaagtgccctactatatcaaccacgagactcaaacaacttgctgggaccatcccaaaatgacagagctctaccagtctttagctgacctgaataatgtcagattctcagcttataggactgccatgaaactccgaagactgcagaaggccctttgcttggatctcttgagcctgtcagctgcatgtgatgccttggaccagcacaacctcaagcaaaatgaccagcccatggatatcctgcagattattaattgtttgaccactatttatgaccgcctggagcaagagcacaacaatttggtcaacgtccctctctgcgtggatatgtgtctgaactggctgctgaatgtttatgatacgggacgaacagggaggatccgtgtcctgtcttttaaaactggcatcatttccctgtgtaaagcacatttggaagacaagtacagataccttttcaagcaagtggcaagttcaacaggattttgtgaccagcgcaggctgggcctccttctgcatgattctatccaaattccaagacagttgggtgaagttgcatcctttgggggcagtaacattgagccaagtgtccggagctgcttccaatttgctaataataagccagagatcgaagcggccctcttcctagactggatgagactggaaccccagtccatggtgtggctgcccgtcctgcacagagtggctgctgcagaaactgccaagcatcaggccaaatgtaacatctgcaaagagtgtccaatcattggattcaggtacaggagtctaaagcactttaattatgacatctgccaaagctgctttttttctggtcgagttgcaaaaggccataaaatgcactatcccatggtggaatattgcactccgactacatcaggagaagatgttcgagactttgccaaggtactaaaaaacaaatttcgaaccaaaaggtattttgcgaagcatccccgaatgggctacctgccagtgcagactgtcttagagggggacaacatggaaactccc

SEQ ID NO: 87 - DNA, 3768 bp, Homo sapiens
  source 1..3768: mol_type = genomic DNA
atggccaagtatggagaacatgaagccagtcctgacaatgggcagaacgaattcagtgatatcattaagtccagatctgatgaacacaatgacgtacagaagaaaacctttaccaaatggataaatgctcgattttcaaagagtgggaaaccacccatcaatgatatgttcacagacctcaaagatggaaggaagctattggatcttctagaaggcctcacaggaacatcactgccaaaggaacgtggttccacaagggtacatgccttaaataacgtcaacagagtgctgcaggttttacatcagaacaatgtggaattagtgaatatagggggaactgacattgtggatggaaatcacaaactgactttggggttactttggagcatcattttgcactggcaggtgaaagatgtcatgaaggatgtcatgtcggacctgcagcagacgaacagtgagaagatcctgctcagctgggtgcgtcagaccaccaggccctacagccaagtcaacgtcctcaacttcaccaccagctggacagatggactcgcctttaatgctgtcctccaccgacataaacctgatctcttcagctgggataaagttgtcaaaatgtcaccaattgagagacttgaacatgccttcagcaaggctcaaacttatttgggaattgaaaagctgttagatcctgaagatgttgccgttcagcttcctgacaagaaatccataattatgtatttaacatctttgtttgaggtgctacctcagcaagtcaccatagacgccatccgtgaggtagagacactcccaaggaaatataaaaaagaatgtgaagaagaggcaattaatatacagagtacagcgcctgaggaggagcatgagagtccccgagctgaaactcccagcactgtcactgaggttgacatggatctggacagctatcagattgcgttggaggaagtgctgacctggttgctttctgctgaggacactttccaggagcaggatgatatttctgatgatgttgaagaagtcaaagaccagtttgcaacccatgaagcttttatgatggaactgactgcacaccagagcagtgtgggcagcgtcctgcaggcaggcaaccaactgataacacaaggaactctgtcagacgaagaagaatttgagattcaggaacagatgaccctgctgaatgctagatgggaggctcttagggtggagagtatggacagacagtcccggctgcacgatgtgctgatggccgctagcgccagatctgttgagaaatggcggcgttttcattatgatataaagatatttaatcagtggctaacagaagctgaacagtttctcagaaagacacaaattcctgagaattgggaacatgctaaatacaaatggtatcttaaggaactccaggatggcattgggcagcggcaaactgttgtcagaacattgaatgcaactggggaagaaataattcagcaatcctcaaaaacagatgccagtattctacaggaaaaattgggaagcctgaatctgcggtggcaggaggtctgcaaacagctgtcagacagaaaaaagaggctagaagaacaaaagaatatcttgtcagaatttcaaagagatttaaatgaatttgttttatggttggaggaagcagataacattgctagtatcccacttgaacctggaaaagagcagcaactaaaagaaaagcttgagcaagtcaagttactggtggaagagttgcccctgcgccagggaattctcaaacaattaaatgaaactggaggacccgtgcttgtaagtgctcccataagcccagaagagcaagataaacttgaaaataagctcaagcagacaaatctccagtggataaaggtttccagagctttacctgagaaacaaggagaaattgaagctcaaataaaagaccttgggcagcttgaaaaaaagcttgaagaccttgaagagcagttaaatcatctgctgctgtggttatctcctattaggaatcagttggaaatttataaccaaccaaaccaagaaggaccatttgacgttaaggaaactgaaatagcagttcaagctaaacaaccggatgtggaagagattttgtctaaagggcagcatttgtacaaggaaaaaccagccactcagccagtgaagaggaagttagaagatctgagctctgagtggaaggcggtaaaccgtttacttcaagagctgagggcaaagcagggtccagcatctcagcactttctttccacgtctgtccagggtccctgggagagagccatctcgccaaacaaagtgccctactatatcaaccacgagactcaaacaacttgctgggaccatcccaaaatgacagagctctaccagtctttagctgacctgaataatgtcagattctcagcttataggactgccatgaaactccgaagactgcagaaggccctttgcttggatctcttgagcctgtcagctgcatgtgatgccttggaccagcacaacctcaagcaaaatgaccagcccatggatatcctgcagattattaattgtttgaccactatttatgaccgcctggagcaagagcacaacaatttggtcaacgtccctctctgcgtggatatgtgtctgaactggctgctgaatgtttatgatacgggacgaacagggaggatccgtgtcctgtcttttaaaactggcatcatttccctgtgtaaagcacatttggaagacaagtacagataccttttcaagcaagtggcaagttcaacaggattttgtgaccagcgcaggctgggcctccttctgcatgattctatccaaattccaagacagttgggtgaagttgcatcctttgggggcagtaacattgagccaagtgtccggagctgcttccaatttgctaataataagccagagatcgaagcggccctcttcctagactggatgagactggaaccccagtccatggtgtggctgcccgtcctgcacagagtggctgctgcagaaactgccaagcatcaggccaaatgtaacatctgcaaagagtgtccaatcattggattcaggtacaggagtctaaagcactttaattatgacatctgccaaagctgctttttttctggtcgagttgcaaaaggccataaaatgcactatcccatggtggaatattgcactccgactacatcaggagaagatgttcgagactttgccaaggtactaaaaaacaaatttcgaaccaaaaggtattttgcgaagcatccccgaatgggctacctgccagtgcagactgtcttagagggggacaacatggaaactcccgttactctgatcaacttctggccagtagattctgcgcctgcctcgtcccctcagctttcacacgatgatactcattcacgcattgaacattatgctagcaggctagcagaaatggaaaacagcaatggatcttatctaaatgatagcatctctcctaatgagagcatagatgatgaacatttgttaatccagcattactgccaaagtttgaaccaggactcccccctgagccagcctcgtagtcctgcccagatcttgatttccttagagagtgaggaaagaggggagctagagagaatcctagcagatcttgaggaagaaaacaggaatctgcaagcagaatatgaccgtctaaagcagcagcacgaacataaaggcctgtccccactgccgtcccctcctgaaatgatgcccacctctccccagagtccc

SEQ ID NO: 88 - DNA, 3768 bp, synthetic construct
  source 1..3768: mol_type = other DNA
atggccaagtacggcgagcacgaggccagccccgacaacggccagaacgagttcagcgacatcatcaagagccggagcgacgagcacaacgacgtgcagaagaagaccttcaccaagtggatcaacgcccggttcagcaagagcggcaagccccccatcaacgacatgttcaccgacctgaaggacggccggaagctgctggacctgctggagggcctgaccggcaccagcctgcccaaggagcggggcagcacccgggtgcacgccctgaacaacgtgaaccgggtgctgcaggtgctgcaccagaacaacgtggagctggtgaacatcggcggcaccgacatcgtggacggcaaccacaagctgaccctgggcctgctgtggagcatcatcctgcactggcaggtgaaggacgtgatgaaggacgtgatgagcgacctgcagcagaccaacagcgagaagatcctgctgagctgggtgcggcagaccacccggccctacagccaggtgaacgtgctgaacttcaccaccagctggaccgacggcctggccttcaacgccgtgctgcaccggcacaagcccgacctgttcagctgggacaaggtggtgaagatgagccccatcgagcggctggagcacgccttcagcaaggcccagacctacctgggcatcgagaagctgctggaccccgaggacgtggccgtgcagctgcccgacaagaagagcatcatcatgtacctgaccagcctgttcgaggtgctgccccagcaggtgaccatcgacgccatccgggaggtggagaccctgccccggaagtacaagaaggagtgcgaggaggaggccatcaacatccagagcaccgcccccgaggaggagcacgagagcccccgggccgagacccccagcaccgtgaccgaggtggacatggacctggacagctaccagatcgccctggaggaggtgctgacctggctgctgagcgccgaggacaccttccaggagcaggacgacatcagcgacgacgtggaggaggtgaaggaccagttcgccacccacgaggccttcatgatggagctgaccgcccaccagagcagcgtgggcagcgtgctgcaggccggcaaccagctgatcacccagggcaccctgagcgacgaggaggagttcgagatccaggagcagatgaccctgctgaacgcccggtgggaggccctgcgggtggagagcatggaccggcagagccggctgcacgacgtgctgatggccgctagcgcccggagcgtggagaagtggcggcggttccactacgacatcaagatcttcaaccagtggctgaccgaggccgagcagttcctgcggaagacccagatccccgagaactgggagcacgccaagtacaagtggtacctgaaggagctgcaggacggcatcggccagcggcagaccgtggtgcggaccctgaacgccaccggcgaggagatcatccagcagagcagcaagaccgacgccagcatcctgcaggagaagctgggcagcctgaacctgcggtggcaggaggtgtgcaagcagctgagcgaccggaagaagcggctggaggagcagaagaacatcctgagcgagttccagcgggacctgaacgagttcgtgctgtggctggaggaggccgacaacatcgccagcatccccctggagcccggcaaggagcagcagctgaaggagaagctggagcaggtgaagctgctggtggaggagctgcccctgcggcagggcatcctgaagcagctgaacgagaccggcggccccgtgctggtgagcgcccccatcagccccgaggagcaggacaagctggagaacaagctgaagcagaccaacctgcagtggatcaaggtgagccgggccctgcccgagaagcagggcgagatcgaggcccagatcaaggacctgggccagctggagaagaagctggaggacctggaggagcagctgaaccacctgctgctgtggctgagccccatccggaaccagctggagatctacaaccagcccaaccaggagggccccttcgacgtgaaggagaccgagatcgccgtgcaggccaagcagcccgacgtggaggagatcctgagcaagggccagcacctgtacaaggagaagcccgccacccagcccgtgaagcggaagctggaggacctgagcagcgagtggaaggccgtgaaccggctgctgcaggagctgcgggccaagcagggtccagcatctcagcactttctttccacgtctgtccagggtccctgggagagagccatctcgccaaacaaagtgccctactatatcaaccacgagactcaaacaacttgctgggaccatcccaaaatgacagagctctaccagtctttagctgacctgaataatgtcagattctcagcttataggactgccatgaaactccgaagactgcagaaggccctttgcttggatctcttgagcctgtcagctgcatgtgatgccttggaccagcacaacctcaagcaaaatgaccagcccatggatatcctgcagattattaattgtttgaccactatttatgaccgcctggagcaagagcacaacaatttggtcaacgtccctctctgcgtggatatgtgtctgaactggctgctgaatgtttatgatacgggacgaacagggaggatccgtgtcctgtcttttaaaactggcatcatttccctgtgtaaagcacatttggaagacaagtacagataccttttcaagcaagtggcaagttcaacaggattttgtgaccagcgcaggctgggcctccttctgcatgattctatccaaattccaagacagttgggtgaagttgcatcctttgggggcagtaacattgagccaagtgtccggagctgcttccaatttgctaataataagccagagatcgaagcggccctcttcctagactggatgagactggaaccccagtccatggtgtggctgcccgtcctgcacagagtggctgctgcagaaactgccaagcatcaggccaaatgtaacatctgcaaagagtgtccaatcattggattcaggtacaggagtctaaagcactttaattatgacatctgccaaagctgctttttttctggtcgagttgcaaaaggccataaaatgcactatcccatggtggaatattgcactccgactacatcaggagaagatgttcgagactttgccaaggtactaaaaaacaaatttcgaaccaaaaggtattttgcgaagcatccccgaatgggctacctgccagtgcagactgtcttagagggggacaacatggaaactcccgttactctgatcaacttctggccagtagattctgcgcctgcctcgtcccctcagctttcacacgatgatactcattcacgcattgaacattatgctagcaggctagcagaaatggaaaacagcaatggatcttatctaaatgatagcatctctcctaatgagagcatagatgatgaacatttgttaatccagcattactgccaaagtttgaaccaggactcccccctgagccagcctcgtagtcctgcccagatcttgatttccttagagagtgaggaaagaggggagctagagagaatcctagcagatcttgaggaagaaaacaggaatctgcaagcagaatatgaccgtctaaagcagcagcacgaacataaaggcctgtccccactgccgtcccctcctgaaatgatgcccacctctccccagagtccc

SEQ ID NO: 89 - DNA, 3579 bp, Homo sapiens
  source 1..3579: mol_type = genomic DNA
atggccaagtatggagaacatgaagccagtcctgacaatgggcagaacgaattcagtgatatcattaagtccagatctgatgaacacaatgacgtacagaagaaaacctttaccaaatggataaatgctcgattttcaaagagtgggaaaccacccatcaatgatatgttcacagacctcaaagatggaaggaagctattggatcttctagaaggcctcacaggaacatcactgccaaaggaacgtggttccacaagggtacatgccttaaataacgtcaacagagtgctgcaggttttacatcagaacaatgtggaattagtgaatatagggggaactgacattgtggatggaaatcacaaactgactttggggttactttggagcatcattttgcactggcaggtgaaagatgtcatgaaggatgtcatgtcggacctgcagcagacgaacagtgagaagatcctgctcagctgggtgcgtcagaccaccaggccctacagccaagtcaacgtcctcaacttcaccaccagctggacagatggactcgcctttaatgctgtcctccaccgacataaacctgatctcttcagctgggataaagttgtcaaaatgtcaccaattgagagacttgaacatgccttcagcaaggctcaaacttatttgggaattgaaaagctgttagatcctgaagatgttgccgttcagcttcctgacaagaaatccataattatgtatttaacatctttgtttgaggtgctacctcagcaagtcaccatagacgccatccgtgaggtagagacactcccaaggaaatataaaaaagaatgtgaagaagaggcaattaatatacagagtacagcgcctgaggaggagcatgagagtccccgagctgaaactcccagcactgtcactgaggttgacatggatctggacagctatcagattgcgttggaggaagtgctgacctggttgctttctgctgaggacactttccaggagcaggatgatatttctgatgatgttgaagaagtcaaagaccagtttgcaacccatgaagcttttatgatggaactgactgcacaccagagcagtgtgggcagcgtcctgcaggcaggcaaccaactgataacacaaggaactctgtcagacgaagaagaatttgagattcaggaacagatgaccctgctgaatgctagatgggaggctcttagggtggagagtatggacagacagtcccggctgcacgatgtgctgatggccgctagcgccagatctgttgagaaatggcggcgttttcattatgatataaagatatttaatcagtggctaacagaagctgaacagtttctcagaaagacacaaattcctgagaattgggaacatgctaaatacaaatggtatcttaaggaactccaggatggcattgggcagcggcaaactgttgtcagaacattgaatgcaactggggaagaaataattcagcaatcctcaaaaacagatgccagtattctacaggaaaaattgggaagcctgaatctgcggtggcaggaggtctgcaaacagctgtcagacagaaaaaagaggctagaagaacaaaagaatatcttgtcagaatttcaaagagatttaaatgaatttgttttatggttggaggaagcagataacattgctagtatcccacttgaacctggaaaagagcagcaactaaaagaaaagcttgagcaagtcaagttactggtggaagagttgcccctgcgccagggaattctcaaacaattaaatgaaactggaggacccgtgcttgtaagtgctcccataagcccagaagagcaagataaacttgaaaataagctcaagcagacaaatctccagtggataaaggtttccagagctttacctgagaaacaaggagaaattgaagctcaaataaaagaccttgggcagcttgaaaaaaagcttgaagaccttgaagagcagttaaatcatctgctgctgtggttatctcctattaggaatcagttggaaatttataaccaaccaaaccaagaaggaccatttgacgttaaggaaactgaaatagcagttcaagctaaacaaccggatgtggaagagattttgtctaaagggcagcatttgtacaaggaaaaaccagccactcagccagtgaagaggaagttagaagatctgagctctgagtggaaggcggtaaaccgtttacttcaagagctgagggcaaagcagggtccagcatctcagcactttctttccacgtctgtccagggtccctgggagagagccatctcgccaaacaaagtgccctactatatcaaccacgagactcaaacaacttgctgggaccatcccaaaatgacagagctctaccagtctttagctgacctgaataatgtcagattctcagcttataggactgccatgaaactccgaagactgcagaaggccctttgcttggatctcttgagcctgtcagctgcatgtgatgccttggaccagcacaacctcaagcaaaatgaccagcccatggatatcctgcagattattaattgtttgaccactatttatgaccgcctggagcaagagcacaacaatttggtcaacgtccctctctgcgtggatatgtgtctgaactggctgctgaatgtttatgatacgggacgaacagggaggatccgtgtcctgtcttttaaaactggcatcatttccctgtgtaaagcacatttggaagacaagtacagataccttttcaagcaagtggcaagttcaacaggattttgtgaccagcgcaggctgggcctccttctgcatgattctatccaaattccaagacagttgggtgaagttgcatcctttgggggcagtaacattgagccaagtgtccggagctgcttccaatttgctaataataagccagagatcgaagcggccctcttcctagactggatgagactggaaccccagtccatggtgtggctgcccgtcctgcacagagtggctgctgcagaaactgccaagcatcaggccaaatgtaacatctgcaaagagtgtccaatcattggattcaggtacaggagtctaaagcactttaattatgacatctgccaaagctgctttttttctggtcgagttgcaaaaggccataaaatgcactatcccatggtggaatattgcactccgactacatcaggagaagatgttcgagactttgccaaggtactaaaaaacaaatttcgaaccaaaaggtattttgcgaagcatccccgaatgggctacctgccagtgcagactgtcttagagggggacaacatggaaactcccgttactctgatcaacttctggccagtagattctgcgcctgcctcgtcccctcagctttcacacgatgatactcattcacgcattgaacattatgctagcaggctagcagaaatggaaaacagcaatggatcttatctaaatgatagcatctctcctaatgagagcatagatgatgaacatttgttaatccagcattactgccaaagtttgaaccaggactcccccctgagccagcctcgtagt

SEQ ID NO: 90 - DNA, 3579 bp, Homo sapiens
  source 1..3579: mol_type = genomic DNA
atggccaagtacggcgagcacgaggccagccccgacaacggccagaacgagttcagcgacatcatcaagagccggagcgacgagcacaacgacgtgcagaagaagaccttcaccaagtggatcaacgcccggttcagcaagagcggcaagccccccatcaacgacatgttcaccgacctgaaggacggccggaagctgctggacctgctggagggcctgaccggcaccagcctgcccaaggagcggggcagcacccgggtgcacgccctgaacaacgtgaaccgggtgctgcaggtgctgcaccagaacaacgtggagctggtgaacatcggcggcaccgacatcgtggacggcaaccacaagctgaccctgggcctgctgtggagcatcatcctgcactggcaggtgaaggacgtgatgaaggacgtgatgagcgacctgcagcagaccaacagcgagaagatcctgctgagctgggtgcggcagaccacccggccctacagccaggtgaacgtgctgaacttcaccaccagctggaccgacggcctggccttcaacgccgtgctgcaccggcacaagcccgacctgttcagctgggacaaggtggtgaagatgagccccatcgagcggctggagcacgccttcagcaaggcccagacctacctgggcatcgagaagctgctggaccccgaggacgtggccgtgcagctgcccgacaagaagagcatcatcatgtacctgaccagcctgttcgaggtgctgccccagcaggtgaccatcgacgccatccgggaggtggagaccctgccccggaagtacaagaaggagtgcgaggaggaggccatcaacatccagagcaccgcccccgaggaggagcacgagagcccccgggccgagacccccagcaccgtgaccgaggtggacatggacctggacagctaccagatcgccctggaggaggtgctgacctggctgctgagcgccgaggacaccttccaggagcaggacgacatcagcgacgacgtggaggaggtgaaggaccagttcgccacccacgaggccttcatgatggagctgaccgcccaccagagcagcgtgggcagcgtgctgcaggccggcaaccagctgatcacccagggcaccctgagcgacgaggaggagttcgagatccaggagcagatgaccctgctgaacgcccggtgggaggccctgcgggtggagagcatggaccggcagagccggctgcacgacgtgctgatggccgctagcgcccggagcgtggagaagtggcggcggttccactacgacatcaagatcttcaaccagtggctgaccgaggccgagcagttcctgcggaagacccagatccccgagaactgggagcacgccaagtacaagtggtacctgaaggagctgcaggacggcatcggccagcggcagaccgtggtgcggaccctgaacgccaccggcgaggagatcatccagcagagcagcaagaccgacgccagcatcctgcaggagaagctgggcagcctgaacctgcggtggcaggaggtgtgcaagcagctgagcgaccggaagaagcggctggaggagcagaagaacatcctgagcgagttccagcgggacctgaacgagttcgtgctgtggctggaggaggccgacaacatcgccagcatccccctggagcccggcaaggagcagcagctgaaggagaagctggagcaggtgaagctgctggtggaggagctgcccctgcggcagggcatcctgaagcagctgaacgagaccggcggccccgtgctggtgagcgcccccatcagccccgaggagcaggacaagctggagaacaagctgaagcagaccaacctgcagtggatcaaggtgagccgggccctgcccgagaagcagggcgagatcgaggcccagatcaaggacctgggccagctggagaagaagctggaggacctggaggagcagctgaaccacctgctgctgtggctgagccccatccggaaccagctggagatctacaaccagcccaaccaggagggccccttcgacgtgaaggagaccgagatcgccgtgcaggccaagcagcccgacgtggaggagatcctgagcaagggccagcacctgtacaaggagaagcccgccacccagcccgtgaagcggaagctggaggacctgagcagcgagtggaaggccgtgaaccggctgctgcaggagctgcgggccaagcagggtccagcatctcagcactttctttccacgtctgtccagggtccctgggagagagccatctcgccaaacaaagtgccctactatatcaaccacgagactcaaacaacttgctgggaccatcccaaaatgacagagctctaccagtctttagctgacctgaataatgtcagattctcagcttataggactgccatgaaactccgaagactgcagaaggccctttgcttggatctcttgagcctgtcagctgcatgtgatgccttggaccagcacaacctcaagcaaaatgaccagcccatggatatcctgcagattattaattgtttgaccactatttatgaccgcctggagcaagagcacaacaatttggtcaacgtccctctctgcgtggatatgtgtctgaactggctgctgaatgtttatgatacgggacgaacagggaggatccgtgtcctgtcttttaaaactggcatcatttccctgtgtaaagcacatttggaagacaagtacagataccttttcaagcaagtggcaagttcaacaggattttgtgaccagcgcaggctgggcctccttctgcatgattctatccaaattccaagacagttgggtgaagttgcatcctttgggggcagtaacattgagccaagtgtccggagctgcttccaatttgctaataataagccagagatcgaagcggccctcttcctagactggatgagactggaaccccagtccatggtgtggctgcccgtcctgcacagagtggctgctgcagaaactgccaagcatcaggccaaatgtaacatctgcaaagagtgtccaatcattggattcaggtacaggagtctaaagcactttaattatgacatctgccaaagctgctttttttctggtcgagttgcaaaaggccataaaatgcactatcccatggtggaatattgcactccgactacatcaggagaagatgttcgagactttgccaaggtactaaaaaacaaatttcgaaccaaaaggtattttgcgaagcatccccgaatgggctacctgccagtgcagactgtcttagagggggacaacatggaaactcccgttactctgatcaacttctggccagtagattctgcgcctgcctcgtcccctcagctttcacacgatgatactcattcacgcattgaacattatgctagcaggctagcagaaatggaaaacagcaatggatcttatctaaatgatagcatctctcctaatgagagcatagatgatgaacatttgttaatccagcattactgccaaagtttgaaccaggactcccccctgagccagcctcgtagt

SEQ ID NO: 91 - DNA, 3921 bp, Homo sapiens
  source 1..3921: mol_type = genomic DNA
atggccaagtatggagaacatgaagccagtcctgacaatgggcagaacgaattcagtgatatcattaagtccagatctgatgaacacaatgacgtacagaagaaaacctttaccaaatggataaatgctcgattttcaaagagtgggaaaccacccatcaatgatatgttcacagacctcaaagatggaaggaagctattggatcttctagaaggcctcacaggaacatcactgccaaaggaacgtggttccacaagggtacatgccttaaataacgtcaacagagtgctgcaggttttacatcagaacaatgtggaattagtgaatatagggggaactgacattgtggatggaaatcacaaactgactttggggttactttggagcatcattttgcactggcaggtgaaagatgtcatgaaggatgtcatgtcggacctgcagcagacgaacagtgagaagatcctgctcagctgggtgcgtcagaccaccaggccctacagccaagtcaacgtcctcaacttcaccaccagctggacagatggactcgcctttaatgctgtcctccaccgacataaacctgatctcttcagctgggataaagttgtcaaaatgtcaccaattgagagacttgaacatgccttcagcaaggctcaaacttatttgggaattgaaaagctgttagatcctgaagatgttgccgttcagcttcctgacaagaaatccataattatgtatttaacatctttgtttgaggtgctacctcagcaagtcaccatagacgccatccgtgaggtagagacactcccaaggaaatataaaaaagaatgtgaagaagaggcaattaatatacagagtacagcgcctgaggaggagcatgagagtccccgagctgaaactcccagcactgtcactgaggttgacatggatctggacagctatcagattgcgttggaggaagtgctgacctggttgctttctgctgaggacactttccaggagcaggatgatatttctgatgatgttgaagaagtcaaagaccagtttgcaacccatgaagcttttatgatggaactgactgcacaccagagcagtgtgggcagcgtcctgcaggcaggcaaccaactgataacacaaggaactctgtcagacgaagaagaatttgagattcaggaacagatgaccctgctgaatgctagatgggaggctcttagggtggagagtatggacagacagtcccggctgcacgatgtgctgatggccgctagcgccagttctgaccagtggaagcgtctgcacctttctctgcaggaacttctggtgtggctacagctgaaagatgatgaattaagccggcaggcacctattggaggcgactttccagcagttcagaagcagaacgatgtacatagggccttcaagagggaattgaaaactaaagaacctgtaatcatgagtactcttgagactgtacgaatatttctgacagagcagcctttggaaggactagagaaactctaccaggagcccagagagctgcctcctgaggagagagcccagaatgtcactcggcttctacgaaagcaggctgaggaggtcaatactgagtgggaaaaattgaacctgcactccgctgactggcagagaaaaatagatgagacccttgaaagactccgggaacttcaagaggccacggatgagctggacctcaagctgcgccaagctgaggtgatcaagggatcctggcagcccgtgggcgatctcctcattgactctctccaagatcacctcgagaaagtcaaggcacttcgaggagaaattgcgcctctgaaagagaacgtgagccacgtcaatgaccttgctcgccagcttaccactttgggcattcagctctcaccgtataacctcagcactctggaagacctgaacaccagatggaagcttctgcaggtggccgtcgaggaccgagtcaggcagctgcatgaagcccacagggactttggtccagcatctcagcactttctttccacgtctgtccagggtccctgggagagagccatctcgccaaacaaagtgccctactatatcaaccacgagactcaaacaacttgctgggaccatcccaaaatgacagagctctaccagtctttagctgacctgaataatgtcagattctcagcttataggactgccatgaaactccgaagactgcagaaggccctttgcttggatctcttgagcctgtcagctgcatgtgatgccttggaccagcacaacctcaagcaaaatgaccagcccatggatatcctgcagattattaattgtttgaccactatttatgaccgcctggagcaagagcacaacaatttggtcaacgtccctctctgcgtggatatgtgtctgaactggctgctgaatgtttatgatacgggacgaacagggaggatccgtgtcctgtcttttaaaactggcatcatttccctgtgtaaagcacatttggaagacaagtacagataccttttcaagcaagtggcaagttcaacaggattttgtgaccagcgcaggctgggcctccttctgcatgattctatccaaattccaagacagttgggtgaagttgcatcctttgggggcagtaacattgagccaagtgtccggagctgcttccaatttgctaataataagccagagatcgaagcggccctcttcctagactggatgagactggaaccccagtccatggtgtggctgcccgtcctgcacagagtggctgctgcagaaactgccaagcatcaggccaaatgtaacatctgcaaagagtgtccaatcattggattcaggtacaggagtctaaagcactttaattatgacatctgccaaagctgctttttttctggtcgagttgcaaaaggccataaaatgcactatcccatggtggaatattgcactccgactacatcaggagaagatgttcgagactttgccaaggtactaaaaaacaaatttcgaaccaaaaggtattttgcgaagcatccccgaatgggctacctgccagtgcagactgtcttagagggggacaacatggaaactcccgttactctgatcaacttctggccagtagattctgcgcctgcctcgtcccctcagctttcacacgatgatactcattcacgcattgaacattatgctagcaggctagcagaaatggaaaacagcaatggatcttatctaaatgatagcatctctcctaatgagagcatagatgatgaacatttgttaatccagcattactgccaaagtttgaaccaggactcccccctgagccagcctcgtagtcctgcccagatcttgatttccttagagagtgaggaaagaggggagctagagagaatcctagcagatcttgaggaagaaaacaggaatctgcaagcagaatatgaccgtctaaagcagcagcacgaacataaaggcctgtccccactgccgtcccctcctgaaatgatgcccacctctccccagagtccccgggatgctgagctcattgctgaggccaagctactgcgtcaacacaaaggccgcctggaagccaggatgcaaatcctggaagaccacaataaacagctggagtcacagttacacaggctaaggcagctgctggagcaaccccaggcagaggccaaagtgaatggcacaacggtgtcctctccttctacctctctacagaggtccgacagcagtcagcctatgctgctccgagtggttggcagtcaaacttcggactccatgggtgaggaagatcttctcagtcctccccaggacacaagcacagggttagaggaggtgatggagcaactcaacaactccttccctagttcaagaggaagaaatacccctggaaagccaatgagagaggacacaatg

SEQ ID NO: 92 - DNA, 3921 bp, Homo sapiens
  source 1..3921: mol_type = genomic DNA
atggccaagtacggcgagcacgaggccagccccgacaacggccagaacgagttcagcgacatcatcaagagccggagcgacgagcacaacgacgtgcagaagaagaccttcaccaagtggatcaacgcccggttcagcaagagcggcaagccccccatcaacgacatgttcaccgacctgaaggacggccggaagctgctggacctgctggagggcctgaccggcaccagcctgcccaaggagcggggcagcacccgggtgcacgccctgaacaacgtgaaccgggtgctgcaggtgctgcaccagaacaacgtggagctggtgaacatcggcggcaccgacatcgtggacggcaaccacaagctgaccctgggcctgctgtggagcatcatcctgcactggcaggtgaaggacgtgatgaaggacgtgatgagcgacctgcagcagaccaacagcgagaagatcctgctgagctgggtgcggcagaccacccggccctacagccaggtgaacgtgctgaacttcaccaccagctggaccgacggcctggccttcaacgccgtgctgcaccggcacaagcccgacctgttcagctgggacaaggtggtgaagatgagccccatcgagcggctggagcacgccttcagcaaggcccagacctacctgggcatcgagaagctgctggaccccgaggacgtggccgtgcagctgcccgacaagaagagcatcatcatgtacctgaccagcctgttcgaggtgctgccccagcaggtgaccatcgacgccatccgggaggtggagaccctgccccggaagtacaagaaggagtgcgaggaggaggccatcaacatccagagcaccgcccccgaggaggagcacgagagcccccgggccgagacccccagcaccgtgaccgaggtggacatggacctggacagctaccagatcgccctggaggaggtgctgacctggctgctgagcgccgaggacaccttccaggagcaggacgacatcagcgacgacgtggaggaggtgaaggaccagttcgccacccacgaggccttcatgatggagctgaccgcccaccagagcagcgtgggcagcgtgctgcaggccggcaaccagctgatcacccagggcaccctgagcgacgaggaggagttcgagatccaggagcagatgaccctgctgaacgcccggtgggaggccctgcgggtggagagcatggaccggcagagccggctgcacgacgtgctgatggccgctagcgccagcagcgaccagtggaagcggctgcacctgagcctgcaggagctgctggtgtggctgcagctgaaggacgacgagctgagccggcaggcccccatcggcggcgacttccccgccgtgcagaagcagaacgacgtgcaccgggccttcaagcgggagctgaagaccaaggagcccgtgatcatgagcaccctggagaccgtgcggatcttcctgaccgagcagcccctggagggcctggagaagctgtaccaggagccccgggagctgccccccgaggagcgggcccagaacgtgacccggctgctgcggaagcaggccgaggaggtgaacaccgagtgggagaagctgaacctgcacagcgccgactggcagagaaaaatagatgagacccttgaaagactccgggaacttcaagaggccacggatgagctggacctcaagctgcgccaagctgaggtgatcaagggatcctggcagcccgtgggcgatctcctcattgactctctccaagatcacctcgagaaagtcaaggcacttcgaggagaaattgcgcctctgaaagagaacgtgagccacgtcaatgaccttgctcgccagcttaccactttgggcattcagctctcaccgtataacctcagcactctggaagacctgaacaccagatggaagcttctgcaggtggccgtcgaggaccgagtcaggcagctgcatgaagcccacagggactttggtccagcatctcagcactttctttccacgtctgtccagggtccctgggagagagccatctcgccaaacaaagtgccctactatatcaaccacgagactcaaacaacttgctgggaccatcccaaaatgacagagctctaccagtctttagctgacctgaataatgtcagattctcagcttataggactgccatgaaactccgaagactgcagaaggccctttgcttggatctcttgagcctgtcagctgcatgtgatgccttggaccagcacaacctcaagcaaaatgaccagcccatggatatcctgcagattattaattgtttgaccactatttatgaccgcctggagcaagagcacaacaatttggtcaacgtccctctctgcgtggatatgtgtctgaactggctgctgaatgtttatgatacgggacgaacagggaggatccgtgtcctgtcttttaaaactggcatcatttccctgtgtaaagcacatttggaagacaagtacagataccttttcaagcaagtggcaagttcaacaggattttgtgaccagcgcaggctgggcctccttctgcatgattctatccaaattccaagacagttgggtgaagttgcatcctttgggggcagtaacattgagccaagtgtccggagctgcttccaatttgctaataataagccagagatcgaagcggccctcttcctagactggatgagactggaaccccagtccatggtgtggctgcccgtcctgcacagagtggctgctgcagaaactgccaagcatcaggccaaatgtaacatctgcaaagagtgtccaatcattggattcaggtacaggagtctaaagcactttaattatgacatctgccaaagctgctttttttctggtcgagttgcaaaaggccataaaatgcactatcccatggtggaatattgcactccgactacatcaggagaagatgttcgagactttgccaaggtactaaaaaacaaatttcgaaccaaaaggtattttgcgaagcatccccgaatgggctacctgccagtgcagactgtcttagagggggacaacatggaaactcccgttactctgatcaacttctggccagtagattctgcgcctgcctcgtcccctcagctttcacacgatgatactcattcacgcattgaacattatgctagcaggctagcagaaatggaaaacagcaatggatcttatctaaatgatagcatctctcctaatgagagcatagatgatgaacatttgttaatccagcattactgccaaagtttgaaccaggactcccccctgagccagcctcgtagtcctgcccagatcttgatttccttagagagtgaggaaagaggggagctagagagaatcctagcagatcttgaggaagaaaacaggaatctgcaagcagaatatgaccgtctaaagcagcagcacgaacataaaggcctgtccccactgccgtcccctcctgaaatgatgcccacctctccccagagtccccgggatgctgagctcattgctgaggccaagctactgcgtcaacacaaaggccgcctggaagccaggatgcaaatcctggaagaccacaataaacagctggagtcacagttacacaggctaaggcagctgctggagcaaccccaggcagaggccaaagtgaatggcacaacggtgtcctctccttctacctctctacagaggtccgacagcagtcagcctatgctgctccgagtggttggcagtcaaacttcggactccatgggtgaggaagatcttctcagtcctccccaggacacaagcacagggttagaggaggtgatggagcaactcaacaactccttccctagttcaagaggaagaaatacccctggaaagccaatgagagaggacacaatg

SEQ ID NO: 93 - protein, 1245 aa, synthetic construct
MAKYGEHEASPDNGQNEFSDIIKSRSDEHNDVQKKTFTKWINARFSKSGKPPINDMFTDLKDGRKLLDLLEGLTGTSLPKERGSTRVHALNNVNRVLQVLHQNNVELVNIGGTDIVDGNHKLTLGLLWSIILHWQVKDVMKDVMSDLQQTNSEKILLSWVRQTTRPYSQVNVLNFTTSWTDGLAFNAVLHRHKPDLFSWDKVVKMSPIERLEHAFSKAQTYLGIEKLLDPEDVAVQLPDKKSIIMYLTSLFEVLPQQVTIDAIREVETLPRKYKKECEEEAINIQSTAPEEEHESPRAETPSTVTEVDMDLDSYQIALEEVLTWLLSAEDTFQEQDDISDDVEEVKDQFATHEAFMMELTAHQSSVGSVLQAGNQLITQGTLSDEEEFEIQEQMTLLNARWEALRVESMDRQSRLHDVLMELQKKQLQQLSAWLTLTEERIQKMETCPLDDDVKSLQKLLEEHKSLQSDLEAEQVKVNSLTHMVVIVDENSGESATAILEDQLQKLGERWTAVCRWTEERWNRLQEIAASAMMVMTEDMPLEISYVPSTYLTEITHVSQALLEVEQLLNAPDLCAKDFEDLFKQEESLKNIKDSLQQSSGRIDIIHSKKTAALQSATPVERVKLQEALSQLDFQWEKVNKMYKDRQGRFDRSVEKWRRFHYDIKIFNQWLTEAEQFLRKTQIPENWEHAKYKWYLKELQDGIGQRQTVVRTLNATGEEIIQQSSKTDASILQEKLGSLNLRWQEVCKQLSDRKKRLEEQKWQRKIDETLERLQELQEATDELDLKLRQAEVIKGSWQPVGDLLIDSLQDHLEKVKALRGEIAPLKENVSHVNDLARQLTTLGIQLSPYNLSTLEDLNTRWKLLQVAVEDRVRQLHEAHRDFGPASQHFLSTSVQGPWERAISPNKVPYYINHETQTTCWDHPKMTELYQSLADLNNVRFSAYRTAMKLRRLQKALCLDLLSLSAACDALDQHNLKQNDQPMDILQIINCLTTIYDRLEQEHNNLVNVPLCVDMCLNWLLNVYDTGRTGRIRVLSFKTGIISLCKAHLEDKYRYLFKQVASSTGFCDQRRLGLLLHDSIQIPRQLGEVASFGGSNIEPSVRSCFQFANNKPEIEAALFLDWMRLEPQSMVWLPVLHRVAAAETAKHQAKCNICKECPIIGFRYRSLKHFNYDICQSCFFSGRVAKGHKMHYPMVEYCTPTTSGEDVRDFAKVLKNKFRTKRYFAKHPRMGYLPVQTVLEGDNMETP

SEQ ID NO: 94 - protein, 1205 aa, synthetic construct
MAKYGEHEASPDNGQNEFSDIIKSRSDEHNDVQKKTFTKWINARFSKSGKPPINDMFTDLKDGRKLLDLLEGLTGTSLPKERGSTRVHALNNVNRVLQVLHQNNVELVNIGGTDIVDGNHKLTLGLLWSIILHWQVKDVMKDVMSDLQQTNSEKILLSWVRQTTRPYSQVNVLNFTTSWTDGLAFNAVLHRHKPDLFSWDKVVKMSPIERLEHAFSKAQTYLGIEKLLDPEDVAVQLPDKKSIIMYLTSLFEVLPQQVTIDAIREVETLPRKYKKECEEEAINIQSTAPEEEHESPRAETPSTVTEVDMDLDSYQIALEEVLTWLLSAEDTFQEQDDISDDVEEVKDQFATHEAFMMELTAHQSSVGSVLQAGNQLITQGTLSDEEEFEIQEQMTLLNARWEALRVESMDRQSRLHDVLMELQKKQLQQLSAWLTLTEERIQKMETCPLDDDVKSLQKLLEEHKSLQSDLEAEQVKVNSLTHMVVIVDENSGESATAILEDQLQKLGERWTAVCRWTEERWNRLQEIAASAMMVMTEDMPLEISYVPSTYLTEITHVSQALLEVEQLLNAPDLCAKDFEDLFKQEESLKNIKDSLQQSSGRIDIIHSKKTAALQSATPVERVKLQEALSQLDFQWEKVNKMYKDRQGRFDRSVEKWRRFHYDIKIFNQWLTEAEQFLRKTQIPENWEHAKYKWYLKELQDGIGQRQTVVRTLNATGEEIIQQSSKTDASILQEKLGSLNLRWQEVCKQLSDRKKRLEEQKGPASQHFLSTSVQGPWERAISPNKVPYYINHETQTTCWDHPKMTELYQSLADLNNVRFSAYRTAMKLRRLQKALCLDLLSLSAACDALDQHNLKQNDQPMDILQIINCLTTIYDRLEQEHNNLVNVPLCVDMCLNWLLNVYDTGRTGRIRVLSFKTGIISLCKAHLEDKYRYLFKQVASSTGFCDQRRLGLLLHDSIQIPRQLGEVASFGGSNIEPSVRSCFQFANNKPEIEAALFLDWMRLEPQSMVWLPVLHRVAAAETAKHQAKCNICKECPIIGFRYRSLKHFNYDICQSCFFSGRVAKGHKMHYPMVEYCTPTTSGEDVRDFAKVLKNKFRTKRYFAKHPRMGYLPVQTVLEGDNMETPVTLINFWPVDSAPASSPQLSHDDTHSRIEHYASRLAEMENSNGSYLNDSISPNESIDDEHLLIQHYCQSLNQDSPLSQPRS

SEQ ID NO: 95 - protein, 1268 aa, synthetic construct
MAKYGEHEASPDNGQNEFSDIIKSRSDEHNDVQKKTFTKWINARFSKSGKPPINDMFTDLKDGRKLLDLLEGLTGTSLPKERGSTRVHALNNVNRVLQVLHQNNVELVNIGGTDIVDGNHKLTLGLLWSIILHWQVKDVMKDVMSDLQQTNSEKILLSWVRQTTRPYSQVNVLNFTTSWTDGLAFNAVLHRHKPDLFSWDKVVKMSPIERLEHAFSKAQTYLGIEKLLDPEDVAVQLPDKKSIIMYLTSLFEVLPQQVTIDAIREVETLPRKYKKECEEEAINIQSTAPEEEHESPRAETPSTVTEVDMDLDSYQIALEEVLTWLLSAEDTFQEQDDISDDVEEVKDQFATHEAFMMELTAHQSSVGSVLQAGNQLITQGTLSDEEEFEIQEQMTLLNARWEALRVESMDRQSRLHDVLMELQKKQLQQLSAWLTLTEERIQKMETCPLDDDVKSLQKLLEEHKSLQSDLEAEQVKVNSLTHMVVIVDENSGESATAILEDQLQKLGERWTAVCRWTEERWNRLQEIAASAMMVMTEDMPLEISYVPSTYLTEITHVSQALLEVEQLLNAPDLCAKDFEDLFKQEESLKNIKDSLQQSSGRIDIIHSKKTAALQSATPVERVKLQEALSQLDFQWEKVNKMYKDRQGRFDRSVEKWRRFHYDIKIFNQWLTEAEQFLRKTQIPENWEHAKYKWYLKELQDGIGQRQTVVRTLNATGEEIIQQSSKTDASILQEKLGSLNLRWQEVCKQLSDRKKRLEEQKGPASQHFLSTSVQGPWERAISPNKVPYYINHETQTTCWDHPKMTELYQSLADLNNVRFSAYRTAMKLRRLQKALCLDLLSLSAACDALDQHNLKQNDQPMDILQIINCLTTIYDRLEQEHNNLVNVPLCVDMCLNWLLNVYDTGRTGRIRVLSFKTGIISLCKAHLEDKYRYLFKQVASSTGFCDQRRLGLLLHDSIQIPRQLGEVASFGGSNIEPSVRSCFQFANNKPEIEAALFLDWMRLEPQSMVWLPVLHRVAAAETAKHQAKCNICKECPIIGFRYRSLKHFNYDICQSCFFSGRVAKGHKMHYPMVEYCTPTTSGEDVRDFAKVLKNKFRTKRYFAKHPRMGYLPVQTVLEGDNMETPVTLINFWPVDSAPASSPQLSHDDTHSRIEHYASRLAEMENSNGSYLNDSISPNESIDDEHLLIQHYCQSLNQDSPLSQPRSPAQILISLESEERGELERILADLEEENRNLQAEYDRLKQQHEHKGLSPLPSPPEMMPTSPQSP

SEQ ID NO: 96 - protein, 1341 aa, synthetic construct
MAKYGEHEASPDNGQNEFSDIIKSRSDEHNDVQKKTFTKWINARFSKSGKPPINDMFTDLKDGRKLLDLLEGLTGTSLPKERGSTRVHALNNVNRVLQVLHQNNVELVNIGGTDIVDGNHKLTLGLLWSIILHWQVKDVMKDVMSDLQQTNSEKILLSWVRQTTRPYSQVNVLNFTTSWTDGLAFNAVLHRHKPDLFSWDKVVKMSPIERLEHAFSKAQTYLGIEKLLDPEDVAVQLPDKKSIIMYLTSLFEVLPQQVTIDAIREVETLPRKYKKECEEEAINIQSTAPEEEHESPRAETPSTVTEVDMDLDSYQIALEEVLTWLLSAEDTFQEQDDISDDVEEVKDQFATHEAFMMELTAHQSSVGSVLQAGNQLITQGTLSDEEEFEIQEQMTLLNARWEALRVESMDRQSRLHDVLMAASAMMVMTEDMPLEISYVPSTYLTEITHVSQALLEVEQLLNAPDLCAKDFEDLFKQEESLKNIKDSLQQSSGRIDIIHSKKTAALQSATPVERVKLQEALSQLDFQWEKVNKMYKDRQGRFDRSVEKWRRFHYDIKIFNQWLTEAEQFLRKTQIPENWEHAKYKWYLKELQDGIGQRQTVVRTLNATGEEIIQQSSKTDASILQEKLGSLNLRWQEVCKQLSDRKKRLEEQKSSDQWKRLHLSLQELLVWLQLKDDELSRQAPIGGDFPAVQKQNDVHRAFKRELKTKEPVIMSTLETVRIFLTEQPLEGLEKLYQEPRELPPEERAQNVTRLLRKQAEEVNTEWEKLNLHSADWQRKIDETLERLQELQEATDELDLKLRQAEVIKGSWQPVGDLLIDSLQDHLEKVKALRGEIAPLKENVSHVNDLARQLTTLGIQLSPYNLSTLEDLNTRWKLLQVAVEDRVRQLHEAHRDFGPASQHFLSTSVQGPWERAISPNKVPYYINHETQTTCWDHPKMTELYQSLADLNNVRFSAYRTAMKLRRLQKALCLDLLSLSAACDALDQHNLKQNDQPMDILQIINCLTTIYDRLEQEHNNLVNVPLCVDMCLNWLLNVYDTGRTGRIRVLSFKTGIISLCKAHLEDKYRYLFKQVASSTGFCDQRRLGLLLHDSIQIPRQLGEVASFGGSNIEPSVRSCFQFANNKPEIEAALFLDWMRLEPQSMVWLPVLHRVAAAETAKHQAKCNICKECPIIGFRYRSLKHFNYDICQSCFFSGRVAKGHKMHYPMVEYCTPTTSGEDVRDFAKVLKNKFRTKRYFAKHPRMGYLPVQTVLEGDNMETPVTLINFWPVDSAPASSPQLSHDDTHSRIEHYASRLAEMENSNGSYLNDSISPNESIDDEHLLIQHYCQSLNQDSPLSQPRS

SEQ ID NO: 97 - protein, 1326 aa, synthetic construct
MAKYGEHEASPDNGQNEFSDIIKSRSDEHNDVQKKTFTKWINARFSKSGKPPINDMFTDLKDGRKLLDLLEGLTGTSLPKERGSTRVHALNNVNRVLQVLHQNNVELVNIGGTDIVDGNHKLTLGLLWSIILHWQVKDVMKDVMSDLQQTNSEKILLSWVRQTTRPYSQVNVLNFTTSWTDGLAFNAVLHRHKPDLFSWDKVVKMSPIERLEHAFSKAQTYLGIEKLLDPEDVAVQLPDKKSIIMYLTSLFEVLPQQVTIDAIREVETLPRKYKKECEEEAINIQSTAPEEEHESPRAETPSTVTEVDMDLDSYQIALEEVLTWLLSAEDTFQEQDDISDDVEEVKDQFATHEAFMMELTAHQSSVGSVLQAGNQLITQGTLSDEEEFEIQEQMTLLNARWEALRVESMDRQSRLHDVLMELQKKQLQQLSAWLTLTEERIQKMETCPLDDDVKSLQKLLEEHKSLQSDLEAEQVKVNSLTHMVVIVDENSGESATAILEDQLQKLGERWTAVCRWTEERWNRLQEIAASAMMVMTEDMPLEISYVPSTYLTEITHVSQALLEVEQLLNAPDLCAKDFEDLFKQEESLKNIKDSLQQSSGRIDIIHSKKTAALQSATPVERVKLQEALSQLDFQWEKVNKMYKDRQGRFDRSVEKWRRFHYDIKIFNQWLTEAEQFLRKTQIPENWEHAKYKWYLKELQDGIGQRQTVVRTLNATGEEIIQQSSKTDASILQEKLGSLNLRWQEVCKQLSDRKKRLEEQKWQRKIDETLERLQELQEATDELDLKLRQAEVIKGSWQPVGDLLIDSLQDHLEKVKALRGEIAPLKENVSHVNDLARQLTTLGIQLSPYNLSTLEDLNTRWKLLQVAVEDRVRQLHEAHRDFGPASQHFLSTSVQGPWERAISPNKVPYYINHETQTTCWDHPKMTELYQSLADLNNVRFSAYRTAMKLRRLQKALCLDLLSLSAACDALDQHNLKQNDQPMDILQIINCLTTIYDRLEQEHNNLVNVPLCVDMCLNWLLNVYDTGRTGRIRVLSFKTGIISLCKAHLEDKYRYLFKQVASSTGFCDQRRLGLLLHDSIQIPRQLGEVASFGGSNIEPSVRSCFQFANNKPEIEAALFLDWMRLEPQSMVWLPVLHRVAAAETAKHQAKCNICKECPIIGFRYRSLKHFNYDICQSCFFSGRVAKGHKMHYPMVEYCTPTTSGEDVRDFAKVLKNKFRTKRYFAKHPRMGYLPVQTVLEGDNMETPVTLINFWPVDSAPASSPQLSHDDTHSRIEHYASRLAEMENSNGSYLNDSISPNESIDDEHLLIQHYCQSLNQDSPLSQPRS

SEQ ID NO: 98 - protein, 1201 aa, synthetic construct
MAKYGEHEASPDNGQNEFSDIIKSRSDEHNDVQKKTFTKWINARFSKSGKPPINDMFTDLKDGRKLLDLLEGLTGTSLPKERGSTRVHALNNVNRVLQVLHQNNVELVNIGGTDIVDGNHKLTLGLLWSIILHWQVKDVMKDVMSDLQQTNSEKILLSWVRQTTRPYSQVNVLNFTTSWTDGLAFNAVLHRHKPDLFSWDKVVKMSPIERLEHAFSKAQTYLGIEKLLDPEDVAVQLPDKKSIIMYLTSLFEVLPQQVTIDAIREVETLPRKYKKECEEEAINIQSTAPEEEHESPRAETPSTVTEVDMDLDSYQIALEEVLTWLLSAEDTFQEQDDISDDVEEVKDQFATHEAFMMELTAHQSSVGSVLQAGNQLITQGTLSDEEEFEIQEQMTLLNARWEALRVESMDRQSRLHDVLMELQKKQLQQLSAWLTLTEERIQKMETCPLDDDVKSLQKLLEEHKSLQSDLEAEQVKVNSLTHMVVIVDENSGESATAILEDQLQKLGERWTAVCRWTEERWNRLQEIAASALQLKDDELSRQAPIGGDFPAVQKQNDVHRAFKRELKTKEPVIMSTLETVRIFLTEQPLEGLEKLYQEPRELPPEERAQNVTRLLRKQAEEVNTEWEKLNLHSADWQRKIDETLERLQELQEATDELDLKLRQAEVIKGSWQPVGDLLIDSLQDHLEKVKALRGEIAPLKENVSHVNDLARQLTTLGIQLSPYNLSTLEDLNTRWKLLQVAVEDRVRQLHEAHRDFGPASQHFLSTSVQGPWERAISPNKVPYYINHETQTTCWDHPKMTELYQSLADLNNVRFSAYRTAMKLRRLQKALCLDLLSLSAACDALDQHNLKQNDQPMDILQIINCLTTIYDRLEQEHNNLVNVPLCVDMCLNWLLNVYDTGRTGRIRVLSFKTGIISLCKAHLEDKYRYLFKQVASSTGFCDQRRLGLLLHDSIQIPRQLGEVASFGGSNIEPSVRSCFQFANNKPEIEAALFLDWMRLEPQSMVWLPVLHRVAAAETAKHQAKCNICKECPIIGFRYRSLKHFNYDICQSCFFSGRVAKGHKMHYPMVEYCTPTTSGEDVRDFAKVLKNKFRTKRYFAKHPRMGYLPVQTVLEGDNMETPVTLINFWPVDSAPASSPQLSHDDTHSRIEHYASRLAEMENSNGSYLNDSISPNESIDDEHLLIQHYCQSLNQDSPLSQPRS

SEQ ID NO: 99 - protein, 1282 aa, synthetic construct
MAKYGEHEASPDNGQNEFSDIIKSRSDEHNDVQKKTFTKWINARFSKSGKPPINDMFTDLKDGRKLLDLLEGLTGTSLPKERGSTRVHALNNVNRVLQVLHQNNVELVNIGGTDIVDGNHKLTLGLLWSIILHWQVKDVMKDVMSDLQQTNSEKILLSWVRQTTRPYSQVNVLNFTTSWTDGLAFNAVLHRHKPDLFSWDKVVKMSPIERLEHAFSKAQTYLGIEKLLDPEDVAVQLPDKKSIIMYLTSLFEVLPQQVTIDAIREVETLPRKYKKECEEEAINIQSTAPEEEHESPRAETPSTVTEVDMDLDSYQIALEEVLTWLLSAEDTFQEQDDISDDVEEVKDQFATHEAFMMELTAHQSSVGSVLQAGNQLITQGTLSDEEEFEIQEQMTLLNARWEALRVESMDRQSRLHDVLMELQKKQLQQLSAWLTLTEERIQKMETCPLDDDVKSLQKLLEEHKSLQSDLEAEQVKVNSLTHMVVIVDENSGESATAILEDQLQKLGERWTAVCRWTEERWNRLQEIAASASSDQWKRLHLSLQELLVWLQLKDDELSRQAPIGGDFPAVQKQNDVHRAFKRELKTKEPVIMSTLETVRIFLTEQPLEGLEKLYQEPRELPPEERAQNVTRLLRKQAEEVNTEWEKLNLHSADWQRKIDETLERLQELQEATDELDLKLRQAEVIKGSWQPVGDLLIDSLQDHLEKVKALRGEIAPLKENVSHVNDLARQLTTLGIQLSPYNLSTLEDLNTRWKLLQVAVEDRVRQLHEAHRDFGPASQHFLSTSVQGPWERAISPNKVPYYINHETQTTCWDHPKMTELYQSLADLNNVRFSAYRTAMKLRRLQKALCLDLLSLSAACDALDQHNLKQNDQPMDILQIINCLTTIYDRLEQEHNNLVNVPLCVDMCLNWLLNVYDTGRTGRIRVLSFKTGIISLCKAHLEDKYRYLFKQVASSTGFCDQRRLGLLLHDSIQIPRQLGEVASFGGSNIEPSVRSCFQFANNKPEIEAALFLDWMRLEPQSMVWLPVLHRVAAAETAKHQAKCNICKECPIIGFRYRSLKHFNYDICQSCFFSGRVAKGHKMHYPMVEYCTPTTSGEDVRDFAKVLKNKFRTKRYFAKHPRMGYLPVQTVLEGDNMETPVTLINFWPVDSAPASSPQLSHDDTHSRIEHYASRLAEMENSNGSYLNDSISPNESIDDEHLLIQHYCQSLNQDSPLSQPRSPAQILISLESEERGELERILADLEEENRNLQAEYDRLKQQHEHKGLSPLPSPPEMMPTSPQSP

SEQ ID NO: 100 - protein, 1330 aa, synthetic construct
MAKYGEHEASPDNGQNEFSDIIKSRSDEHNDVQKKTFTKWINARFSKSGKPPINDMFTDLKDGRKLLDLLEGLTGTSLPKERGSTRVHALNNVNRVLQVLHQNNVELVNIGGTDIVDGNHKLTLGLLWSIILHWQVKDVMKDVMSDLQQTNSEKILLSWVRQTTRPYSQVNVLNFTTSWTDGLAFNAVLHRHKPDLFSWDKVVKMSPIERLEHAFSKAQTYLGIEKLLDPEDVAVQLPDKKSIIMYLTSLFEVLPQQVTIDAIREVETLPRKYKKECEEEAINIQSTAPEEEHESPRAETPSTVTEVDMDLDSYQIALEEVLTWLLSAEDTFQEQDDISDDVEEVKDQFATHEAFMMELTAHQSSVGSVLQAGNQLITQGTLSDEEEFEIQEQMTLLNARWEALRVESMDRQSRLHDVLMELQKKQLQQLSAWLTLTEERIQKMETCPLDDDVKSLQKLLEEHKSLQSDLEAEQVKVNSLTHMVVIVDENSGESATAILEDQLQKLGERWTAVCRWTEERWNRLQEINILWQELLEEQCLLKAWLTEKEEALNKVQTSNFKDQKELSVSVRRLAILKEDMEMKRQTLDQLSEIGQDVGQLLDNSKASKKINSDSEELTQRWDSLVQRLEDSSNQVTQAAASASSDQWKRLHLSLQELLVWLQLKDDELSRQAPIGGDFPAVQKQNDVHRAFKRELKTKEPVIMSTLETVRIFLTEQPLEGLEKLYQEPRELPPEERAQNVTRLLRKQAEEVNTEWEKLNLHSADWQRKIDETLERLQELQEATDELDLKLRQAEVIKGSWQPVGDLLIDSLQDHLEKVKALRGEIAPLKENVSHVNDLARQLTTLGIQLSPYNLSTLEDLNTRWKLLQVAVEDRVRQLHEAHRDFGPASQHFLSTSVQGPWERAISPNKVPYYINHETQTTCWDHPKMTELYQSLADLNNVRFSAYRTAMKLRRLQKALCLDLLSLSAACDALDQHNLKQNDQPMDILQIINCLTTIYDRLEQEHNNLVNVPLCVDMCLNWLLNVYDTGRTGRIRVLSFKTGIISLCKAHLEDKYRYLFKQVASSTGFCDQRRLGLLLHDSIQIPRQLGEVASFGGSNIEPSVRSCFQFANNKPEIEAALFLDWMRLEPQSMVWLPVLHRVAAAETAKHQAKCNICKECPIIGFRYRSLKHFNYDICQSCFFSGRVAKGHKMHYPMVEYCTPTTSGEDVRDFAKVLKNKFRTKRYFAKHPRMGYLPVQTVLEGDNMETPVTLINFWPVDSAPASSPQLSHDDTHSRIEHYASRLAEMENSNGSYLNDSISPNESIDDEHLLIQHYCQSLNQDSPLSQPRS

SEQ ID NO: 101 - protein, 1414 aa, synthetic construct
MAKYGEHEASPDNGQNEFSDIIKSRSDEHNDVQKKTFTKWINARFSKSGKPPINDMFTDLKDGRKLLDLLEGLTGTSLPKERGSTRVHALNNVNRVLQVLHQNNVELVNIGGTDIVDGNHKLTLGLLWSIILHWQVKDVMKDVMSDLQQTNSEKILLSWVRQTTRPYSQVNVLNFTTSWTDGLAFNAVLHRHKPDLFSWDKVVKMSPIERLEHAFSKAQTYLGIEKLLDPEDVAVQLPDKKSIIMYLTSLFEVLPQQVTIDAIREVETLPRKYKKECEEEAINIQSTAPEEEHESPRAETPSTVTEVDMDLDSYQIALEEVLTWLLSAEDTFQEQDDISDDVEEVKDQFATHEAFMMELTAHQSSVGSVLQAGNQLITQGTLSDEEEFEIQEQMTLLNARWEALRVESMDRQSRLHDVLMELQKKQLQQLSAWLTLTEERIQKMETCPLDDDVKSLQKLLEEHKSLQSDLEAEQVKVNSLTHMVVIVDENSGESATAILEDQLQKLGERWTAVCRWTEERWNRLQEIAASASSDQWKRLHLSLQELLVWLQLKDDELSRQAPIGGDFPAVQKQNDVHRAFKRELKTKEPVIMSTLETVRIFLTEQPLEGLEKLYQEPRELPPEERAQNVTRLLRKQAEEVNTEWEKLNLHSADWQRKIDETLERLQELQEATDELDLKLRQAEVIKGSWQPVGDLLIDSLQDHLEKVKALRGEIAPLKENVSHVNDLARQLTTLGIQLSPYNLSTLEDLNTRWKLLQVAVEDRVRQLHEAHRDFGPASQHFLSTSVQGPWERAISPNKVPYYINHETQTTCWDHPKMTELYQSLADLNNVRFSAYRTAMKLRRLQKALCLDLLSLSAACDALDQHNLKQNDQPMDILQIINCLTTIYDRLEQEHNNLVNVPLCVDMCLNWLLNVYDTGRTGRIRVLSFKTGIISLCKAHLEDKYRYLFKQVASSTGFCDQRRLGLLLHDSIQIPRQLGEVASFGGSNIEPSVRSCFQFANNKPEIEAALFLDWMRLEPQSMVWLPVLHRVAAAETAKHQAKCNICKECPIIGFRYRSLKHFNYDICQSCFFSGRVAKGHKMHYPMVEYCTPTTSGEDVRDFAKVLKNKFRTKRYFAKHPRMGYLPVQTVLEGDNMETPVTLINFWPVDSAPASSPQLSHDDTHSRIEHYASRLAEMENSNGSYLNDSISPNESIDDEHLLIQHYCQSLNQDSPLSQPRSPAQILISLESEERGELERILADLEEENRNLQAEYDRLKQQHEHKGLSPLPSPPEMMPTSPQSPRDAELIAEAKLLRQHKGRLEARMQILEDHNKQLESQLHRLRQLLEQPQAEAKVNGTTVSSPSTSLQRSDSSQPMLLRVVGSQTSDSMGEEDLLSPPQDTSTGLEEVMEQLNNSFPSSRGRNTPGKPMREDTM

SEQ ID NO: 102 - DNA, 3735 bp, Homo sapiens
  source 1..3735: mol_type = genomic DNA
atggccaagtatggagaacatgaagccagtcctgacaatgggcagaacgaattcagtgatatcattaagtccagatctgatgaacacaatgacgtacagaagaaaacctttaccaaatggataaatgctcgattttcaaagagtgggaaaccacccatcaatgatatgttcacagacctcaaagatggaaggaagctattggatcttctagaaggcctcacaggaacatcactgccaaaggaacgtggttccacaagggtacatgccttaaataacgtcaacagagtgctgcaggttttacatcagaacaatgtggaattagtgaatatagggggaactgacattgtggatggaaatcacaaactgactttggggttactttggagcatcattttgcactggcaggtgaaagatgtcatgaaggatgtcatgtcggacctgcagcagacgaacagtgagaagatcctgctcagctgggtgcgtcagaccaccaggccctacagccaagtcaacgtcctcaacttcaccaccagctggacagatggactcgcctttaatgctgtcctccaccgacataaacctgatctcttcagctgggataaagttgtcaaaatgtcaccaattgagagacttgaacatgccttcagcaaggctcaaacttatttgggaattgaaaagctgttagatcctgaagatgttgccgttcagcttcctgacaagaaatccataattatgtatttaacatctttgtttgaggtgctacctcagcaagtcaccatagacgccatccgtgaggtagagacactcccaaggaaatataaaaaagaatgtgaagaagaggcaattaatatacagagtacagcgcctgaggaggagcatgagagtccccgagctgaaactcccagcactgtcactgaggttgacatggatctggacagctatcagattgcgttggaggaagtgctgacctggttgctttctgctgaggacactttccaggagcaggatgatatttctgatgatgttgaagaagtcaaagaccagtttgcaacccatgaagcttttatgatggaactgactgcacaccagagcagtgtgggcagcgtcctgcaggcaggcaaccaactgataacacaaggaactctgtcagacgaagaagaatttgagattcaggaacagatgaccctgctgaatgctagatgggaggctcttagggtggagagtatggacagacagtcccggctgcacgatgtgctgatggaactgcagaagaagcaactgcagcagctctccgcctggttaacactcacagaggagcgcattcagaagatggaaacttgccccctggatgatgatgtaaaatctctacaaaagctgctagaagaacataaaagtttgcaaagtgatcttgaggctgaacaggtgaaagtaaattcactaactcacatggtggtcattgttgatgaaaacagtggtgagagtgctacagctatcctagaagaccagttacagaaacttggtgagcgctggacagcagtatgccgttggactgaagaacgctggaataggttacaagaaatcgccgctagcgccatgatggtgatgactgaagacatgcctttggaaatttcttatgtgccttctacttatttgactgaaatcactcatgtctcacaagccctattagaagtggaacaacttctcaatgctcctgacctctgtgctaaggactttgaagatctctttaagcaagaggagtctctgaagaatataaaagatagtctacaacaaagctcaggtcggattgacattattcatagcaagaagacagcagcattgcaaagtgcaacgcctgtggaaagggtgaagctacaggaagctctctcccagcttgatttccaatgggaaaaagttaacaaaatgtacaaggaccgacaagggcgatttgacagatctgttgagaaatggcggcgttttcattatgatataaagatatttaatcagtggctaacagaagctgaacagtttctcagaaagacacaaattcctgagaattgggaacatgctaaatacaaatggtatcttaaggaactccaggatggcattgggcagcggcaaactgttgtcagaacattgaatgcaactggggaagaaataattcagcaatcctcaaaaacagatgccagtattctacaggaaaaattgggaagcctgaatctgcggtggcaggaggtctgcaaacagctgtcagacagaaaaaagaggctagaagaacaaaagtggcagagaaaaatagatgagacccttgaaagactccgggaacttcaagaggccacggatgagctggacctcaagctgcgccaagctgaggtgatcaagggatcctggcagcccgtgggcgatctcctcattgactctctccaagatcacctcgagaaagtcaaggcacttcgaggagaaattgcgcctctgaaagagaacgtgagccacgtcaatgaccttgctcgccagcttaccactttgggcattcagctctcaccgtataacctcagcactctggaagacctgaacaccagatggaagcttctgcaggtggccgtcgaggaccgagtcaggcagctgcatgaagcccacagggactttggtccagcatctcagcactttctttccacgtctgtccagggtccctgggagagagccatctcgccaaacaaagtgccctactatatcaaccacgagactcaaacaacttgctgggaccatcccaaaatgacagagctctaccagtctttagctgacctgaataatgtcagattctcagcttataggactgccatgaaactccgaagactgcagaaggccctttgcttggatctcttgagcctgtcagctgcatgtgatgccttggaccagcacaacctcaagcaaaatgaccagcccatggatatcctgcagattattaattgtttgaccactatttatgaccgcctggagcaagagcacaacaatttggtcaacgtccctctctgcgtggatatgtgtctgaactggctgctgaatgtttatgatacgggacgaacagggaggatccgtgtcctgtcttttaaaactggcatcatttccctgtgtaaagcacatttggaagacaagtacagataccttttcaagcaagtggcaagttcaacaggattttgtgaccagcgcaggctgggcctccttctgcatgattctatccaaattccaagacagttgggtgaagttgcatcctttgggggcagtaacattgagccaagtgtccggagctgcttccaatttgctaataataagccagagatcgaagcggccctcttcctagactggatgagactggaaccccagtccatggtgtggctgcccgtcctgcacagagtggctgctgcagaaactgccaagcatcaggccaaatgtaacatctgcaaagagtgtccaatcattggattcaggtacaggagtctaaagcactttaattatgacatctgccaaagctgctttttttctggtcgagttgcaaaaggccataaaatgcactatcccatggtggaatattgcactccgactacatcaggagaagatgttcgagactttgccaaggtactaaaaaacaaatttcgaaccaaaaggtattttgcgaagcatccccgaatgggctacctgccagtgcagactgtcttagagggggacaacatggaaactccc

SEQ ID NO: 103 - DNA, 3735 bp, synthetic construct
  source 1..3735: mol_type = other DNA
atggccaagtacggcgagcacgaggccagccccgacaacggccagaacgagttcagcgacatcatcaagagccggagcgacgagcacaacgacgtgcagaagaagaccttcaccaagtggatcaacgcccggttcagcaagagcggcaagccccccatcaacgacatgttcaccgacctgaaggacggccggaagctgctggacctgctggagggcctgaccggcaccagcctgcccaaggagcggggcagcacccgggtgcacgccctgaacaacgtgaaccgggtgctgcaggtgctgcaccagaacaacgtggagctggtgaacatcggcggcaccgacatcgtggacggcaaccacaagctgaccctgggcctgctgtggagcatcatcctgcactggcaggtgaaggacgtgatgaaggacgtgatgagcgacctgcagcagaccaacagcgagaagatcctgctgagctgggtgcggcagaccacccggccctacagccaggtgaacgtgctgaacttcaccaccagctggaccgacggcctggccttcaacgccgtgctgcaccggcacaagcccgacctgttcagctgggacaaggtggtgaagatgagccccatcgagcggctggagcacgccttcagcaaggcccagacctacctgggcatcgagaagctgctggaccccgaggacgtggccgtgcagctgcccgacaagaagagcatcatcatgtacctgaccagcctgttcgaggtgctgccccagcaggtgaccatcgacgccatccgggaggtggagaccctgccccggaagtacaagaaggagtgcgaggaggaggccatcaacatccagagcaccgcccccgaggaggagcacgagagcccccgggccgagacccccagcaccgtgaccgaggtggacatggacctggacagctaccagatcgccctggaggaggtgctgacctggctgctgagcgccgaggacaccttccaggagcaggacgacatcagcgacgacgtggaggaggtgaaggaccagttcgccacccacgaggccttcatgatggagctgaccgcccaccagagcagcgtgggcagcgtgctgcaggccggcaaccagctgatcacccagggcaccctgagcgacgaggaggagttcgagatccaggagcagatgaccctgctgaacgcccggtgggaggccctgcgggtggagagcatggaccggcagagccggctgcacgacgtgctgatggagctgcagaagaagcagctgcagcagctgagcgcctggctgaccctgaccgaggagcggatccagaagatggagacctgccccctggacgacgacgtgaagagcctgcagaagctgctggaggagcacaagagcctgcagagcgacctggaggccgagcaggtgaaggtgaacagcctgacccacatggtggtgatcgtggacgagaacagcggcgagagcgccaccgccatcctggaggaccagctgcagaagctgggcgagcggtggaccgccgtgtgccggtggaccgaggagcggtggaaccggctgcaggagatcgccgctagcgccatgatggtgatgaccgaggacatgcccctggagatcagctacgtgcccagcacctacctgaccgagatcacccacgtgagccaggccctgctggaggtggagcagctgctgaacgcccccgacctgtgcgccaaggacttcgaggacctgttcaagcaggaggagagcctgaagaacatcaaggacagcctgcagcagagcagcggccggatcgacatcatccacagcaagaagaccgccgccctgcagagcgccacccccgtggagcgggtgaagctgcaggaggccctgagccagctggacttccagtgggagaaggtgaacaagatgtacaaggaccggcagggccggttcgaccggagcgtggagaagtggcggcggttccactacgacatcaagatcttcaaccagtggctgaccgaggccgagcagttcctgcggaagacccagatccccgagaactgggagcacgccaagtacaagtggtacctgaaggagctgcaggacggcatcggccagcggcagaccgtggtgcggaccctgaacgccaccggcgaggagatcatccagcagagcagcaagaccgacgccagcatcctgcaggagaagctgggcagcctgaacctgcggtggcaggaggtgtgcaagcagctgagcgaccggaagaagcggctggaggagcagaagtggcagcggaagatcgacgagaccctggagcggctgcaggagctgcaggaggccaccgacgagctggacctgaagctgcggcaggccgaggtgatcaagggcagctggcagcccgtgggcgacctgctgatcgacagcctgcaggaccacctggagaaggtgaaggccctgcggggcgagatcgcccccctgaaggagaacgtgagccacgtgaacgacctggcccggcagctgaccaccctgggcatccagctgagcccctacaacctgagcaccctggaggacctgaacacccggtggaagctgctgcaggtggccgtggaggaccgggtgcggcagctgcacgaggcccaccgggacttcggccccgccagccagcacttcctgagcaccagcgtgcagggcccctgggagcgggccatcagccccaacaaggtgccctactacatcaaccacgagacccagaccacctgctgggaccaccccaagatgaccgagctgtaccagagcctggccgacctgaacaacgtgcggttcagcgcctaccggaccgccatgaagctgcggcggctgcagaaggccctgtgcctggacctgctgagcctgagcgccgcctgcgacgccctggaccagcacaacctgaagcagaacgaccagcccatggacatcctgcagatcatcaactgcctgaccaccatctacgaccggctggagcaggagcacaacaacctggtgaacgtgcccctgtgcgtggacatgtgcctgaactggctgctgaacgtgtacgacaccggccggaccggccggatccgggtgctgagcttcaagaccggcatcatcagcctgtgcaaggcccacctggaggacaagtaccggtacctgttcaagcaggtggccagcagcaccggcttctgcgaccagcggcggctgggcctgctgctgcacgacagcatccagatcccccggcagctgggcgaggtggccagcttcggcggcagcaacatcgagcccagcgtgcggagctgcttccagttcgccaacaacaagcccgagatcgaggccgccctgttcctggactggatgcggctggagccccagagcatggtgtggctgcccgtgctgcaccgggtggccgccgccgagaccgccaagcaccaggccaagtgcaacatctgcaaggagtgccccatcatcggcttccggtaccggagcctgaagcacttcaactacgacatctgccagagctgcttcttcagcggccgggtggccaagggccacaagatgcactaccccatggtggagtactgcacccccaccaccagcggcgaggacgtgcgggacttcgccaaggtgctgaagaacaagttccggaccaagcggtacttcgccaagcacccccggatgggctacctgcccgtgcagaccgtgctggagggcgacaacatggagaccccc

SEQ ID NO: 104 - DNA, 3615 bp, Homo sapiens
  source 1..3615: mol_type = genomic DNA
atggccaagtatggagaacatgaagccagtcctgacaatgggcagaacgaattcagtgatatcattaagtccagatctgatgaacacaatgacgtacagaagaaaacctttaccaaatggataaatgctcgattttcaaagagtgggaaaccacccatcaatgatatgttcacagacctcaaagatggaaggaagctattggatcttctagaaggcctcacaggaacatcactgccaaaggaacgtggttccacaagggtacatgccttaaataacgtcaacagagtgctgcaggttttacatcagaacaatgtggaattagtgaatatagggggaactgacattgtggatggaaatcacaaactgactttggggttactttggagcatcattttgcactggcaggtgaaagatgtcatgaaggatgtcatgtcggacctgcagcagacgaacagtgagaagatcctgctcagctgggtgcgtcagaccaccaggccctacagccaagtcaacgtcctcaacttcaccaccagctggacagatggactcgcctttaatgctgtcctccaccgacataaacctgatctcttcagctgggataaagttgtcaaaatgtcaccaattgagagacttgaacatgccttcagcaaggctcaaacttatttgggaattgaaaagctgttagatcctgaagatgttgccgttcagcttcctgacaagaaatccataattatgtatttaacatctttgtttgaggtgctacctcagcaagtcaccatagacgccatccgtgaggtagagacactcccaaggaaatataaaaaagaatgtgaagaagaggcaattaatatacagagtacagcgcctgaggaggagcatgagagtccccgagctgaaactcccagcactgtcactgaggttgacatggatctggacagctatcagattgcgttggaggaagtgctgacctggttgctttctgctgaggacactttccaggagcaggatgatatttctgatgatgttgaagaagtcaaagaccagtttgcaacccatgaagcttttatgatggaactgactgcacaccagagcagtgtgggcagcgtcctgcaggcaggcaaccaactgataacacaaggaactctgtcagacgaagaagaatttgagattcaggaacagatgaccctgctgaatgctagatgggaggctcttagggtggagagtatggacagacagtcccggctgcacgatgtgctgatggaactgcagaagaagcaactgcagcagctctccgcctggttaacactcacagaggagcgcattcagaagatggaaacttgccccctggatgatgatgtaaaatctctacaaaagctgctagaagaacataaaagtttgcaaagtgatcttgaggctgaacaggtgaaagtaaattcactaactcacatggtggtcattgttgatgaaaacagtggtgagagtgctacagctatcctagaagaccagttacagaaacttggtgagcgctggacagcagtatgccgttggactgaagaacgctggaataggttacaagaaatcgccgctagcgccatgatggtgatgactgaagacatgcctttggaaatttcttatgtgccttctacttatttgactgaaatcactcatgtctcacaagccctattagaagtggaacaacttctcaatgctcctgacctctgtgctaaggactttgaagatctctttaagcaagaggagtctctgaagaatataaaagatagtctacaacaaagctcaggtcggattgacattattcatagcaagaagacagcagcattgcaaagtgcaacgcctgtggaaagggtgaagctacaggaagctctctcccagcttgatttccaatgggaaaaagttaacaaaatgtacaaggaccgacaagggcgatttgacagatctgttgagaaatggcggcgttttcattatgatataaagatatttaatcagtggctaacagaagctgaacagtttctcagaaagacacaaattcctgagaattgggaacatgctaaatacaaatggtatcttaaggaactccaggatggcattgggcagcggcaaactgttgtcagaacattgaatgcaactggggaagaaataattcagcaatcctcaaaaacagatgccagtattctacaggaaaaattgggaagcctgaatctgcggtggcaggaggtctgcaaacagctgtcagacagaaaaaagaggctagaagaacaaaagggtccagcatctcagcactttctttccacgtctgtccagggtccctgggagagagccatctcgccaaacaaagtgccctactatatcaaccacgagactcaaacaacttgctgggaccatcccaaaatgacagagctctaccagtctttagctgacctgaataatgtcagattctcagcttataggactgccatgaaactccgaagactgcagaaggccctttgcttggatctcttgagcctgtcagctgcatgtgatgccttggaccagcacaacctcaagcaaaatgaccagcccatggatatcctgcagattattaattgtttgaccactatttatgaccgcctggagcaagagcacaacaatttggtcaacgtccctctctgcgtggatatgtgtctgaactggctgctgaatgtttatgatacgggacgaacagggaggatccgtgtcctgtcttttaaaactggcatcatttccctgtgtaaagcacatttggaagacaagtacagataccttttcaagcaagtggcaagttcaacaggattttgtgaccagcgcaggctgggcctccttctgcatgattctatccaaattccaagacagttgggtgaagttgcatcctttgggggcagtaacattgagccaagtgtccggagctgcttccaatttgctaataataagccagagatcgaagcggccctcttcctagactggatgagactggaaccccagtccatggtgtggctgcccgtcctgcacagagtggctgctgcagaaactgccaagcatcaggccaaatgtaacatctgcaaagagtgtccaatcattggattcaggtacaggagtctaaagcactttaattatgacatctgccaaagctgctttttttctggtcgagttgcaaaaggccataaaatgcactatcccatggtggaatattgcactccgactacatcaggagaagatgttcgagactttgccaaggtactaaaaaacaaatttcgaaccaaaaggtattttgcgaagcatccccgaatgggctacctgccagtgcagactgtcttagagggggacaacatggaaactcccgttactctgatcaacttctggccagtagattctgcgcctgcctcgtcccctcagctttcacacgatgatactcattcacgcattgaacattatgctagcaggctagcagaaatggaaaacagcaatggatcttatctaaatgatagcatctctcctaatgagagcatagatgatgaacatttgttaatccagcattactgccaaagtttgaaccaggactcccccctgagccagcctcgtagt

SEQ ID NO: 105 - DNA, 3615 bp, synthetic construct
  source 1..3615: mol_type = other DNA
atggccaagtacggcgagcacgaggccagccccgacaacggccagaacgagttcagcgacatcatcaagagccggagcgacgagcacaacgacgtgcagaagaagaccttcaccaagtggatcaacgcccggttcagcaagagcggcaagccccccatcaacgacatgttcaccgacctgaaggacggccggaagctgctggacctgctggagggcctgaccggcaccagcctgcccaaggagcggggcagcacccgggtgcacgccctgaacaacgtgaaccgggtgctgcaggtgctgcaccagaacaacgtggagctggtgaacatcggcggcaccgacatcgtggacggcaaccacaagctgaccctgggcctgctgtggagcatcatcctgcactggcaggtgaaggacgtgatgaaggacgtgatgagcgacctgcagcagaccaacagcgagaagatcctgctgagctgggtgcggcagaccacccggccctacagccaggtgaacgtgctgaacttcaccaccagctggaccgacggcctggccttcaacgccgtgctgcaccggcacaagcccgacctgttcagctgggacaaggtggtgaagatgagccccatcgagcggctggagcacgccttcagcaaggcccagacctacctgggcatcgagaagctgctggaccccgaggacgtggccgtgcagctgcccgacaagaagagcatcatcatgtacctgaccagcctgttcgaggtgctgccccagcaggtgaccatcgacgccatccgggaggtggagaccctgccccggaagtacaagaaggagtgcgaggaggaggccatcaacatccagagcaccgcccccgaggaggagcacgagagcccccgggccgagacccccagcaccgtgaccgaggtggacatggacctggacagctaccagatcgccctggaggaggtgctgacctggctgctgagcgccgaggacaccttccaggagcaggacgacatcagcgacgacgtggaggaggtgaaggaccagttcgccacccacgaggccttcatgatggagctgaccgcccaccagagcagcgtgggcagcgtgctgcaggccggcaaccagctgatcacccagggcaccctgagcgacgaggaggagttcgagatccaggagcagatgaccctgctgaacgcccggtgggaggccctgcgggtggagagcatggaccggcagagccggctgcacgacgtgctgatggagctgcagaagaagcagctgcagcagctgagcgcctggctgaccctgaccgaggagcggatccagaagatggagacctgccccctggacgacgacgtgaagagcctgcagaagctgctggaggagcacaagagcctgcagagcgacctggaggccgagcaggtgaaggtgaacagcctgacccacatggtggtgatcgtggacgagaacagcggcgagagcgccaccgccatcctggaggaccagctgcagaagctgggcgagcggtggaccgccgtgtgccggtggaccgaggagcggtggaaccggctgcaggagatcgccgctagcgccatgatggtgatgaccgaggacatgcccctggagatcagctacgtgcccagcacctacctgaccgagatcacccacgtgagccaggccctgctggaggtggagcagctgctgaacgcccccgacctgtgcgccaaggacttcgaggacctgttcaagcaggaggagagcctgaagaacatcaaggacagcctgcagcagagcagcggccggatcgacatcatccacagcaagaagaccgccgccctgcagagcgccacccccgtggagcgggtgaagctgcaggaggccctgagccagctggacttccagtgggagaaggtgaacaagatgtacaaggaccggcagggccggttcgaccggagcgtggagaagtggcggcggttccactacgacatcaagatcttcaaccagtggctgaccgaggccgagcagttcctgcggaagacccagatccccgagaactgggagcacgccaagtacaagtggtacctgaaggagctgcaggacggcatcggccagcggcagaccgtggtgcggaccctgaacgccaccggcgaggagatcatccagcagagcagcaagaccgacgccagcatcctgcaggagaagctgggcagcctgaacctgcggtggcaggaggtgtgcaagcagctgagcgaccggaagaagcggctggaggagcagaagggccccgccagccagcacttcctgagcaccagcgtgcagggcccctgggagcgggccatcagccccaacaaggtgccctactacatcaaccacgagacccagaccacctgctgggaccaccccaagatgaccgagctgtaccagagcctggccgacctgaacaacgtgcggttcagcgcctaccggaccgccatgaagctgcggcggctgcagaaggccctgtgcctggacctgctgagcctgagcgccgcctgcgacgccctggaccagcacaacctgaagcagaacgaccagcccatggacatcctgcagatcatcaactgcctgaccaccatctacgaccggctggagcaggagcacaacaacctggtgaacgtgcccctgtgcgtggacatgtgcctgaactggctgctgaacgtgtacgacaccggccggaccggccggatccgggtgctgagcttcaagaccggcatcatcagcctgtgcaaggcccacctggaggacaagtaccggtacctgttcaagcaggtggccagcagcaccggcttctgcgaccagcggcggctgggcctgctgctgcacgacagcatccagatcccccggcagctgggcgaggtggccagcttcggcggcagcaacatcgagcccagcgtgcggagctgcttccagttcgccaacaacaagcccgagatcgaggccgccctgttcctggactggatgcggctggagccccagagcatggtgtggctgcccgtgctgcaccgggtggccgccgccgagaccgccaagcaccaggccaagtgcaacatctgcaaggagtgccccatcatcggcttccggtaccggagcctgaagcacttcaactacgacatctgccagagctgcttcttcagcggccgggtggccaagggccacaagatgcactaccccatggtggagtactgcacccccaccaccagcggcgaggacgtgcgggacttcgccaaggtgctgaagaacaagttccggaccaagcggtacttcgccaagcacccccggatgggctacctgcccgtgcagaccgtgctggagggcgacaacatggagacccccgtgaccctgatcaacttctggcccgtggacagcgcccccgccagcagcccccagctgagccacgacgacacccacagccggatcgagcactacgccagccggctggccgagatggagaacagcaacggcagctacctgaacgacagcatcagccccaacgagagcatcgacgacgagcacctgctgatccagcactactgccagagcctgaaccaggacagccccctgagccagccccggagc

SEQ ID NO: 106 - DNA, 3804 bp, Homo sapiens
  source 1..3804: mol_type = genomic DNA
atggccaagtatggagaacatgaagccagtcctgacaatgggcagaacgaattcagtgatatcattaagtccagatctgatgaacacaatgacgtacagaagaaaacctttaccaaatggataaatgctcgattttcaaagagtgggaaaccacccatcaatgatatgttcacagacctcaaagatggaaggaagctattggatcttctagaaggcctcacaggaacatcactgccaaaggaacgtggttccacaagggtacatgccttaaataacgtcaacagagtgctgcaggttttacatcagaacaatgtggaattagtgaatatagggggaactgacattgtggatggaaatcacaaactgactttggggttactttggagcatcattttgcactggcaggtgaaagatgtcatgaaggatgtcatgtcggacctgcagcagacgaacagtgagaagatcctgctcagctgggtgcgtcagaccaccaggccctacagccaagtcaacgtcctcaacttcaccaccagctggacagatggactcgcctttaatgctgtcctccaccgacataaacctgatctcttcagctgggataaagttgtcaaaatgtcaccaattgagagacttgaacatgccttcagcaaggctcaaacttatttgggaattgaaaagctgttagatcctgaagatgttgccgttcagcttcctgacaagaaatccataattatgtatttaacatctttgtttgaggtgctacctcagcaagtcaccatagacgccatccgtgaggtagagacactcccaaggaaatataaaaaagaatgtgaagaagaggcaattaatatacagagtacagcgcctgaggaggagcatgagagtccccgagctgaaactcccagcactgtcactgaggttgacatggatctggacagctatcagattgcgttggaggaagtgctgacctggttgctttctgctgaggacactttccaggagcaggatgatatttctgatgatgttgaagaagtcaaagaccagtttgcaacccatgaagcttttatgatggaactgactgcacaccagagcagtgtgggcagcgtcctgcaggcaggcaaccaactgataacacaaggaactctgtcagacgaagaagaatttgagattcaggaacagatgaccctgctgaatgctagatgggaggctcttagggtggagagtatggacagacagtcccggctgcacgatgtgctgatggaactgcagaagaagcaactgcagcagctctccgcctggttaacactcacagaggagcgcattcagaagatggaaacttgccccctggatgatgatgtaaaatctctacaaaagctgctagaagaacataaaagtttgcaaagtgatcttgaggctgaacaggtgaaagtaaattcactaactcacatggtggtcattgttgatgaaaacagtggtgagagtgctacagctatcctagaagaccagttacagaaacttggtgagcgctggacagcagtatgccgttggactgaagaacgctggaataggttacaagaaatcgccgctagcgccatgatggtgatgactgaagacatgcctttggaaatttcttatgtgccttctacttatttgactgaaatcactcatgtctcacaagccctattagaagtggaacaacttctcaatgctcctgacctctgtgctaaggactttgaagatctctttaagcaagaggagtctctgaagaatataaaagatagtctacaacaaagctcaggtcggattgacattattcatagcaagaagacagcagcattgcaaagtgcaacgcctgtggaaagggtgaagctacaggaagctctctcccagcttgatttccaatgggaaaaagttaacaaaatgtacaaggaccgacaagggcgatttgacagatctgttgagaaatggcggcgttttcattatgatataaagatatttaatcagtggctaacagaagctgaacagtttctcagaaagacacaaattcctgagaattgggaacatgctaaatacaaatggtatcttaaggaactccaggatggcattgggcagcggcaaactgttgtcagaacattgaatgcaactggggaagaaataattcagcaatcctcaaaaacagatgccagtattctacaggaaaaattgggaagcctgaatctgcggtggcaggaggtctgcaaacagctgtcagacagaaaaaagaggctagaagaacaaaagggtccagcatctcagcactttctttccacgtctgtccagggtccctgggagagagccatctcgccaaacaaagtgccctactatatcaaccacgagactcaaacaacttgctgggaccatcccaaaatgacagagctctaccagtctttagctgacctgaataatgtcagattctcagcttataggactgccatgaaactccgaagactgcagaaggccctttgcttggatctcttgagcctgtcagctgcatgtgatgccttggaccagcacaacctcaagcaaaatgaccagcccatggatatcctgcagattattaattgtttgaccactatttatgaccgcctggagcaagagcacaacaatttggtcaacgtccctctctgcgtggatatgtgtctgaactggctgctgaatgtttatgatacgggacgaacagggaggatccgtgtcctgtcttttaaaactggcatcatttccctgtgtaaagcacatttggaagacaagtacagataccttttcaagcaagtggcaagttcaacaggattttgtgaccagcgcaggctgggcctccttctgcatgattctatccaaattccaagacagttgggtgaagttgcatcctttgggggcagtaacattgagccaagtgtccggagctgcttccaatttgctaataataagccagagatcgaagcggccctcttcctagactggatgagactggaaccccagtccatggtgtggctgcccgtcctgcacagagtggctgctgcagaaactgccaagcatcaggccaaatgtaacatctgcaaagagtgtccaatcattggattcaggtacaggagtctaaagcactttaattatgacatctgccaaagctgctttttttctggtcgagttgcaaaaggccataaaatgcactatcccatggtggaatattgcactccgactacatcaggagaagatgttcgagactttgccaaggtactaaaaaacaaatttcgaaccaaaaggtattttgcgaagcatccccgaatgggctacctgccagtgcagactgtcttagagggggacaacatggaaactcccgttactctgatcaacttctggccagtagattctgcgcctgcctcgtcccctcagctttcacacgatgatactcattcacgcattgaacattatgctagcaggctagcagaaatggaaaacagcaatggatcttatctaaatgatagcatctctcctaatgagagcatagatgatgaacatttgttaatccagcattactgccaaagtttgaaccaggactcccccctgagccagcctcgtagtcctgcccagatcttgatttccttagagagtgaggaaagaggggagctagagagaatcctagcagatcttgaggaagaaaacaggaatctgcaagcagaatatgaccgtctaaagcagcagcacgaacataaaggcctgtccccactgccgtcccctcctgaaatgatgcccacctctccccagagtccc

SEQ ID NO: 107 - DNA, 3804 bp, synthetic construct
  source 1..3804: mol_type = other DNA
atggccaagtacggcgagcacgaggccagccccgacaacggccagaacgagttcagcgacatcatcaagagccggagcgacgagcacaacgacgtgcagaagaagaccttcaccaagtggatcaacgcccggttcagcaagagcggcaagccccccatcaacgacatgttcaccgacctgaaggacggccggaagctgctggacctgctggagggcctgaccggcaccagcctgcccaaggagcggggcagcacccgggtgcacgccctgaacaacgtgaaccgggtgctgcaggtgctgcaccagaacaacgtggagctggtgaacatcggcggcaccgacatcgtggacggcaaccacaagctgaccctgggcctgctgtggagcatcatcctgcactggcaggtgaaggacgtgatgaaggacgtgatgagcgacctgcagcagaccaacagcgagaagatcctgctgagctgggtgcggcagaccacccggccctacagccaggtgaacgtgctgaacttcaccaccagctggaccgacggcctggccttcaacgccgtgctgcaccggcacaagcccgacctgttcagctgggacaaggtggtgaagatgagccccatcgagcggctggagcacgccttcagcaaggcccagacctacctgggcatcgagaagctgctggaccccgaggacgtggccgtgcagctgcccgacaagaagagcatcatcatgtacctgaccagcctgttcgaggtgctgccccagcaggtgaccatcgacgccatccgggaggtggagaccctgccccggaagtacaagaaggagtgcgaggaggaggccatcaacatccagagcaccgcccccgaggaggagcacgagagcccccgggccgagacccccagcaccgtgaccgaggtggacatggacctggacagctaccagatcgccctggaggaggtgctgacctggctgctgagcgccgaggacaccttccaggagcaggacgacatcagcgacgacgtggaggaggtgaaggaccagttcgccacccacgaggccttcatgatggagctgaccgcccaccagagcagcgtgggcagcgtgctgcaggccggcaaccagctgatcacccagggcaccctgagcgacgaggaggagttcgagatccaggagcagatgaccctgctgaacgcccggtgggaggccctgcgggtggagagcatggaccggcagagccggctgcacgacgtgctgatggagctgcagaagaagcagctgcagcagctgagcgcctggctgaccctgaccgaggagcggatccagaagatggagacctgccccctggacgacgacgtgaagagcctgcagaagctgctggaggagcacaagagcctgcagagcgacctggaggccgagcaggtgaaggtgaacagcctgacccacatggtggtgatcgtggacgagaacagcggcgagagcgccaccgccatcctggaggaccagctgcagaagctgggcgagcggtggaccgccgtgtgccggtggaccgaggagcggtggaaccggctgcaggagatcgccgctagcgccatgatggtgatgaccgaggacatgcccctggagatcagctacgtgcccagcacctacctgaccgagatcacccacgtgagccaggccctgctggaggtggagcagctgctgaacgcccccgacctgtgcgccaaggacttcgaggacctgttcaagcaggaggagagcctgaagaacatcaaggacagcctgcagcagagcagcggccggatcgacatcatccacagcaagaagaccgccgccctgcagagcgccacccccgtggagcgggtgaagctgcaggaggccctgagccagctggacttccagtgggagaaggtgaacaagatgtacaaggaccggcagggccggttcgaccggagcgtggagaagtggcggcggttccactacgacatcaagatcttcaaccagtggctgaccgaggccgagcagttcctgcggaagacccagatccccgagaactgggagcacgccaagtacaagtggtacctgaaggagctgcaggacggcatcggccagcggcagaccgtggtgcggaccctgaacgccaccggcgaggagatcatccagcagagcagcaagaccgacgccagcatcctgcaggagaagctgggcagcctgaacctgcggtggcaggaggtgtgcaagcagctgagcgaccggaagaagcggctggaggagcagaagggccccgccagccagcacttcctgagcaccagcgtgcagggcccctgggagcgggccatcagccccaacaaggtgccctactacatcaaccacgagacccagaccacctgctgggaccaccccaagatgaccgagctgtaccagagcctggccgacctgaacaacgtgcggttcagcgcctaccggaccgccatgaagctgcggcggctgcagaaggccctgtgcctggacctgctgagcctgagcgccgcctgcgacgccctggaccagcacaacctgaagcagaacgaccagcccatggacatcctgcagatcatcaactgcctgaccaccatctacgaccggctggagcaggagcacaacaacctggtgaacgtgcccctgtgcgtggacatgtgcctgaactggctgctgaacgtgtacgacaccggccggaccggccggatccgggtgctgagcttcaagaccggcatcatcagcctgtgcaaggcccacctggaggacaagtaccggtacctgttcaagcaggtggccagcagcaccggcttctgcgaccagcggcggctgggcctgctgctgcacgacagcatccagatcccccggcagctgggcgaggtggccagcttcggcggcagcaacatcgagcccagcgtgcggagctgcttccagttcgccaacaacaagcccgagatcgaggccgccctgttcctggactggatgcggctggagccccagagcatggtgtggctgcccgtgctgcaccgggtggccgccgccgagaccgccaagcaccaggccaagtgcaacatctgcaaggagtgccccatcatcggcttccggtaccggagcctgaagcacttcaactacgacatctgccagagctgcttcttcagcggccgggtggccaagggccacaagatgcactaccccatggtggagtactgcacccccaccaccagcggcgaggacgtgcgggacttcgccaaggtgctgaagaacaagttccggaccaagcggtacttcgccaagcacccccggatgggctacctgcccgtgcagaccgtgctggagggcgacaacatggagacccccgtgaccctgatcaacttctggcccgtggacagcgcccccgccagcagcccccagctgagccacgacgacacccacagccggatcgagcactacgccagccggctggccgagatggagaacagcaacggcagctacctgaacgacagcatcagccccaacgagagcatcgacgacgagcacctgctgatccagcactactgccagagcctgaaccaggacagccccctgagccagccccggagccccgcccagatcctgatcagcctggagagcgaggagcggggcgagctggagcggatcctggccgacctggaggaggagaaccggaacctgcaggccgagtacgaccggctgaagcagcagcacgagcacaagggcctgagccccctgcccagcccccccgagatgatgcccaccagcccccagagcccc

SEQ ID NO: 108 - DNA, 4023 bp, Homo sapiens
  source 1..4023: mol_type = genomic DNA
atggccaagtatggagaacatgaagccagtcctgacaatgggcagaacgaattcagtgatatcattaagtccagatctgatgaacacaatgacgtacagaagaaaacctttaccaaatggataaatgctcgattttcaaagagtgggaaaccacccatcaatgatatgttcacagacctcaaagatggaaggaagctattggatcttctagaaggcctcacaggaacatcactgccaaaggaacgtggttccacaagggtacatgccttaaataacgtcaacagagtgctgcaggttttacatcagaacaatgtggaattagtgaatatagggggaactgacattgtggatggaaatcacaaactgactttggggttactttggagcatcattttgcactggcaggtgaaagatgtcatgaaggatgtcatgtcggacctgcagcagacgaacagtgagaagatcctgctcagctgggtgcgtcagaccaccaggccctacagccaagtcaacgtcctcaacttcaccaccagctggacagatggactcgcctttaatgctgtcctccaccgacataaacctgatctcttcagctgggataaagttgtcaaaatgtcaccaattgagagacttgaacatgccttcagcaaggctcaaacttatttgggaattgaaaagctgttagatcctgaagatgttgccgttcagcttcctgacaagaaatccataattatgtatttaacatctttgtttgaggtgctacctcagcaagtcaccatagacgccatccgtgaggtagagacactcccaaggaaatataaaaaagaatgtgaagaagaggcaattaatatacagagtacagcgcctgaggaggagcatgagagtccccgagctgaaactcccagcactgtcactgaggttgacatggatctggacagctatcagattgcgttggaggaagtgctgacctggttgctttctgctgaggacactttccaggagcaggatgatatttctgatgatgttgaagaagtcaaagaccagtttgcaacccatgaagcttttatgatggaactgactgcacaccagagcagtgtgggcagcgtcctgcaggcaggcaaccaactgataacacaaggaactctgtcagacgaagaagaatttgagattcaggaacagatgaccctgctgaatgctagatgggaggctcttagggtggagagtatggacagacagtcccggctgcacgatgtgctgatggccgctagcgccatgatggtgatgactgaagacatgcctttggaaatttcttatgtgccttctacttatttgactgaaatcactcatgtctcacaagccctattagaagtggaacaacttctcaatgctcctgacctctgtgctaaggactttgaagatctctttaagcaagaggagtctctgaagaatataaaagatagtctacaacaaagctcaggtcggattgacattattcatagcaagaagacagcagcattgcaaagtgcaacgcctgtggaaagggtgaagctacaggaagctctctcccagcttgatttccaatgggaaaaagttaacaaaatgtacaaggaccgacaagggcgatttgacagatctgttgagaaatggcggcgttttcattatgatataaagatatttaatcagtggctaacagaagctgaacagtttctcagaaagacacaaattcctgagaattgggaacatgctaaatacaaatggtatcttaaggaactccaggatggcattgggcagcggcaaactgttgtcagaacattgaatgcaactggggaagaaataattcagcaatcctcaaaaacagatgccagtattctacaggaaaaattgggaagcctgaatctgcggtggcaggaggtctgcaaacagctgtcagacagaaaaaagaggctagaagaacaaaagagttctgaccagtggaagcgtctgcacctttctctgcaggaacttctggtgtggctacagctgaaagatgatgaattaagccggcaggcacctattggaggcgactttccagcagttcagaagcagaacgatgtacatagggccttcaagagggaattgaaaactaaagaacctgtaatcatgagtactcttgagactgtacgaatatttctgacagagcagcctttggaaggactagagaaactctaccaggagcccagagagctgcctcctgaggagagagcccagaatgtcactcggcttctacgaaagcaggctgaggaggtcaatactgagtgggaaaaattgaacctgcactccgctgactggcagagaaaaatagatgagacccttgaaagactccgggaacttcaagaggccacggatgagctggacctcaagctgcgccaagctgaggtgatcaagggatcctggcagcccgtgggcgatctcctcattgactctctccaagatcacctcgagaaagtcaaggcacttcgaggagaaattgcgcctctgaaagagaacgtgagccacgtcaatgaccttgctcgccagcttaccactttgggcattcagctctcaccgtataacctcagcactctggaagacctgaacaccagatggaagcttctgcaggtggccgtcgaggaccgagtcaggcagctgcatgaagcccacagggactttggtccagcatctcagcactttctttccacgtctgtccagggtccctgggagagagccatctcgccaaacaaagtgccctactatatcaaccacgagactcaaacaacttgctgggaccatcccaaaatgacagagctctaccagtctttagctgacctgaataatgtcagattctcagcttataggactgccatgaaactccgaagactgcagaaggccctttgcttggatctcttgagcctgtcagctgcatgtgatgccttggaccagcacaacctcaagcaaaatgaccagcccatggatatcctgcagattattaattgtttgaccactatttatgaccgcctggagcaagagcacaacaatttggtcaacgtccctctctgcgtggatatgtgtctgaactggctgctgaatgtttatgatacgggacgaacagggaggatccgtgtcctgtcttttaaaactggcatcatttccctgtgtaaagcacatttggaagacaagtacagataccttttcaagcaagtggcaagttcaacaggattttgtgaccagcgcaggctgggcctccttctgcatgattctatccaaattccaagacagttgggtgaagttgcatcctttgggggcagtaacattgagccaagtgtccggagctgcttccaatttgctaataataagccagagatcgaagcggccctcttcctagactggatgagactggaaccccagtccatggtgtggctgcccgtcctgcacagagtggctgctgcagaaactgccaagcatcaggccaaatgtaacatctgcaaagagtgtccaatcattggattcaggtacaggagtctaaagcactttaattatgacatctgccaaagctgctttttttctggtcgagttgcaaaaggccataaaatgcactatcccatggtggaatattgcactccgactacatcaggagaagatgttcgagactttgccaaggtactaaaaaacaaatttcgaaccaaaaggtattttgcgaagcatccccgaatgggctacctgccagtgcagactgtcttagagggggacaacatggaaactcccgttactctgatcaacttctggccagtagattctgcgcctgcctcgtcccctcagctttcacacgatgatactcattcacgcattgaacattatgctagcaggctagcagaaatggaaaacagcaatggatcttatctaaatgatagcatctctcctaatgagagcatagatgatgaacatttgttaatccagcattactgccaaagtttgaaccaggactcccccctgagccagcctcgtagt

SEQ ID NO: 109 - DNA, 4023 bp, synthetic construct
  source 1..4023: mol_type = other DNA
atggccaagtacggcgagcacgaggccagccccgacaacggccagaacgagttcagcgacatcatcaagagccggagcgacgagcacaacgacgtgcagaagaagaccttcaccaagtggatcaacgcccggttcagcaagagcggcaagccccccatcaacgacatgttcaccgacctgaaggacggccggaagctgctggacctgctggagggcctgaccggcaccagcctgcccaaggagcggggcagcacccgggtgcacgccctgaacaacgtgaaccgggtgctgcaggtgctgcaccagaacaacgtggagctggtgaacatcggcggcaccgacatcgtggacggcaaccacaagctgaccctgggcctgctgtggagcatcatcctgcactggcaggtgaaggacgtgatgaaggacgtgatgagcgacctgcagcagaccaacagcgagaagatcctgctgagctgggtgcggcagaccacccggccctacagccaggtgaacgtgctgaacttcaccaccagctggaccgacggcctggccttcaacgccgtgctgcaccggcacaagcccgacctgttcagctgggacaaggtggtgaagatgagccccatcgagcggctggagcacgccttcagcaaggcccagacctacctgggcatcgagaagctgctggaccccgaggacgtggccgtgcagctgcccgacaagaagagcatcatcatgtacctgaccagcctgttcgaggtgctgccccagcaggtgaccatcgacgccatccgggaggtggagaccctgccccggaagtacaagaaggagtgcgaggaggaggccatcaacatccagagcaccgcccccgaggaggagcacgagagcccccgggccgagacccccagcaccgtgaccgaggtggacatggacctggacagctaccagatcgccctggaggaggtgctgacctggctgctgagcgccgaggacaccttccaggagcaggacgacatcagcgacgacgtggaggaggtgaaggaccagttcgccacccacgaggccttcatgatggagctgaccgcccaccagagcagcgtgggcagcgtgctgcaggccggcaaccagctgatcacccagggcaccctgagcgacgaggaggagttcgagatccaggagcagatgaccctgctgaacgcccggtgggaggccctgcgggtggagagcatggaccggcagagccggctgcacgacgtgctgatggccgctagcgccatgatggtgatgaccgaggacatgcccctggagatcagctacgtgcccagcacctacctgaccgagatcacccacgtgagccaggccctgctggaggtggagcagctgctgaacgcccccgacctgtgcgccaaggacttcgaggacctgttcaagcaggaggagagcctgaagaacatcaaggacagcctgcagcagagcagcggccggatcgacatcatccacagcaagaagaccgccgccctgcagagcgccacccccgtggagcgggtgaagctgcaggaggccctgagccagctggacttccagtgggagaaggtgaacaagatgtacaaggaccggcagggccggttcgaccggagcgtggagaagtggcggcggttccactacgacatcaagatcttcaaccagtggctgaccgaggccgagcagttcctgcggaagacccagatccccgagaactgggagcacgccaagtacaagtggtacctgaaggagctgcaggacggcatcggccagcggcagaccgtggtgcggaccctgaacgccaccggcgaggagatcatccagcagagcagcaagaccgacgccagcatcctgcaggagaagctgggcagcctgaacctgcggtggcaggaggtgtgcaagcagctgagcgaccggaagaagcggctggaggagcagaagagcagcgaccagtggaagcggctgcacctgagcctgcaggagctgctggtgtggctgcagctgaaggacgacgagctgagccggcaggcccccatcggcggcgacttccccgccgtgcagaagcagaacgacgtgcaccgggccttcaagcgggagctgaagaccaaggagcccgtgatcatgagcaccctggagaccgtgcggatcttcctgaccgagcagcccctggagggcctggagaagctgtaccaggagccccgggagctgccccccgaggagcgggcccagaacgtgacccggctgctgcggaagcaggccgaggaggtgaacaccgagtgggagaagctgaacctgcacagcgccgactggcagcggaagatcgacgagaccctggagcggctgcaggagctgcaggaggccaccgacgagctggacctgaagctgcggcaggccgaggtgatcaagggcagctggcagcccgtgggcgacctgctgatcgacagcctgcaggaccacctggagaaggtgaaggccctgcggggcgagatcgcccccctgaaggagaacgtgagccacgtgaacgacctggcccggcagctgaccaccctgggcatccagctgagcccctacaacctgagcaccctggaggacctgaacacccggtggaagctgctgcaggtggccgtggaggaccgggtgcggcagctgcacgaggcccaccgggacttcggccccgccagccagcacttcctgagcaccagcgtgcagggcccctgggagcgggccatcagccccaacaaggtgccctactacatcaaccacgagacccagaccacctgctgggaccaccccaagatgaccgagctgtaccagagcctggccgacctgaacaacgtgcggttcagcgcctaccggaccgccatgaagctgcggcggctgcagaaggccctgtgcctggacctgctgagcctgagcgccgcctgcgacgccctggaccagcacaacctgaagcagaacgaccagcccatggacatcctgcagatcatcaactgcctgaccaccatctacgaccggctggagcaggagcacaacaacctggtgaacgtgcccctgtgcgtggacatgtgcctgaactggctgctgaacgtgtacgacaccggccggaccggccggatccgggtgctgagcttcaagaccggcatcatcagcctgtgcaaggcccacctggaggacaagtaccggtacctgttcaagcaggtggccagcagcaccggcttctgcgaccagcggcggctgggcctgctgctgcacgacagcatccagatcccccggcagctgggcgaggtggccagcttcggcggcagcaacatcgagcccagcgtgcggagctgcttccagttcgccaacaacaagcccgagatcgaggccgccctgttcctggactggatgcggctggagccccagagcatggtgtggctgcccgtgctgcaccgggtggccgccgccgagaccgccaagcaccaggccaagtgcaacatctgcaaggagtgccccatcatcggcttccggtaccggagcctgaagcacttcaactacgacatctgccagagctgcttcttcagcggccgggtggccaagggccacaagatgcactaccccatggtggagtactgcacccccaccaccagcggcgaggacgtgcgggacttcgccaaggtgctgaagaacaagttccggaccaagcggtacttcgccaagcacccccggatgggctacctgcccgtgcagaccgtgctggagggcgacaacatggagacccccgtgaccctgatcaacttctggcccgtggacagcgcccccgccagcagcccccagctgagccacgacgacacccacagccggatcgagcactacgccagccggctggccgagatggagaacagcaacggcagctacctgaacgacagcatcagccccaacgagagcatcgacgacgagcacctgctgatccagcactactgccagagcctgaaccaggacagccccctgagccagccccggagc

SEQ ID NO: 110 - DNA, 3978 bp, Homo sapiens
  source 1..3978: mol_type = genomic DNA
atggccaagtatggagaacatgaagccagtcctgacaatgggcagaacgaattcagtgatatcattaagtccagatctgatgaacacaatgacgtacagaagaaaacctttaccaaatggataaatgctcgattttcaaagagtgggaaaccacccatcaatgatatgttcacagacctcaaagatggaaggaagctattggatcttctagaaggcctcacaggaacatcactgccaaaggaacgtggttccacaagggtacatgccttaaataacgtcaacagagtgctgcaggttttacatcagaacaatgtggaattagtgaatatagggggaactgacattgtggatggaaatcacaaactgactttggggttactttggagcatcattttgcactggcaggtgaaagatgtcatgaaggatgtcatgtcggacctgcagcagacgaacagtgagaagatcctgctcagctgggtgcgtcagaccaccaggccctacagccaagtcaacgtcctcaacttcaccaccagctggacagatggactcgcctttaatgctgtcctccaccgacataaacctgatctcttcagctgggataaagttgtcaaaatgtcaccaattgagagacttgaacatgccttcagcaaggctcaaacttatttgggaattgaaaagctgttagatcctgaagatgttgccgttcagcttcctgacaagaaatccataattatgtatttaacatctttgtttgaggtgctacctcagcaagtcaccatagacgccatccgtgaggtagagacactcccaaggaaatataaaaaagaatgtgaagaagaggcaattaatatacagagtacagcgcctgaggaggagcatgagagtccccgagctgaaactcccagcactgtcactgaggttgacatggatctggacagctatcagattgcgttggaggaagtgctgacctggttgctttctgctgaggacactttccaggagcaggatgatatttctgatgatgttgaagaagtcaaagaccagtttgcaacccatgaagcttttatgatggaactgactgcacaccagagcagtgtgggcagcgtcctgcaggcaggcaaccaactgataacacaaggaactctgtcagacgaagaagaatttgagattcaggaacagatgaccctgctgaatgctagatgggaggctcttagggtggagagtatggacagacagtcccggctgcacgatgtgctgatggaactgcagaagaagcaactgcagcagctctccgcctggttaacactcacagaggagcgcattcagaagatggaaacttgccccctggatgatgatgtaaaatctctacaaaagctgctagaagaacataaaagtttgcaaagtgatcttgaggctgaacaggtgaaagtaaattcactaactcacatggtggtcattgttgatgaaaacagtggtgagagtgctacagctatcctagaagaccagttacagaaacttggtgagcgctggacagcagtatgccgttggactgaagaacgctggaataggttacaagaaatcgccgctagcgccatgatggtgatgactgaagacatgcctttggaaatttcttatgtgccttctacttatttgactgaaatcactcatgtctcacaagccctattagaagtggaacaacttctcaatgctcctgacctctgtgctaaggactttgaagatctctttaagcaagaggagtctctgaagaatataaaagatagtctacaacaaagctcaggtcggattgacattattcatagcaagaagacagcagcattgcaaagtgcaacgcctgtggaaagggtgaagctacaggaagctctctcccagcttgatttccaatgggaaaaagttaacaaaatgtacaaggaccgacaagggcgatttgacagatctgttgagaaatggcggcgttttcattatgatataaagatatttaatcagtggctaacagaagctgaacagtttctcagaaagacacaaattcctgagaattgggaacatgctaaatacaaatggtatcttaaggaactccaggatggcattgggcagcggcaaactgttgtcagaacattgaatgcaactggggaagaaataattcagcaatcctcaaaaacagatgccagtattctacaggaaaaattgggaagcctgaatctgcggtggcaggaggtctgcaaacagctgtcagacagaaaaaagaggctagaagaacaaaagtggcagagaaaaatagatgagacccttgaaagactccgggaacttcaagaggccacggatgagctggacctcaagctgcgccaagctgaggtgatcaagggatcctggcagcccgtgggcgatctcctcattgactctctccaagatcacctcgagaaagtcaaggcacttcgaggagaaattgcgcctctgaaagagaacgtgagccacgtcaatgaccttgctcgccagcttaccactttgggcattcagctctcaccgtataacctcagcactctggaagacctgaacaccagatggaagcttctgcaggtggccgtcgaggaccgagtcaggcagctgcatgaagcccacagggactttggtccagcatctcagcactttctttccacgtctgtccagggtccctgggagagagccatctcgccaaacaaagtgccctactatatcaaccacgagactcaaacaacttgctgggaccatcccaaaatgacagagctctaccagtctttagctgacctgaataatgtcagattctcagcttataggactgccatgaaactccgaagactgcagaaggccctttgcttggatctcttgagcctgtcagctgcatgtgatgccttggaccagcacaacctcaagcaaaatgaccagcccatggatatcctgcagattattaattgtttgaccactatttatgaccgcctggagcaagagcacaacaatttggtcaacgtccctctctgcgtggatatgtgtctgaactggctgctgaatgtttatgatacgggacgaacagggaggatccgtgtcctgtcttttaaaactggcatcatttccctgtgtaaagcacatttggaagacaagtacagataccttttcaagcaagtggcaagttcaacaggattttgtgaccagcgcaggctgggcctccttctgcatgattctatccaaattccaagacagttgggtgaagttgcatcctttgggggcagtaacattgagccaagtgtccggagctgcttccaatttgctaataataagccagagatcgaagcggccctcttcctagactggatgagactggaaccccagtccatggtgtggctgcccgtcctgcacagagtggctgctgcagaaactgccaagcatcaggccaaatgtaacatctgcaaagagtgtccaatcattggattcaggtacaggagtctaaagcactttaattatgacatctgccaaagctgctttttttctggtcgagttgcaaaaggccataaaatgcactatcccatggtggaatattgcactccgactacatcaggagaagatgttcgagactttgccaaggtactaaaaaacaaatttcgaaccaaaaggtattttgcgaagcatccccgaatgggctacctgccagtgcagactgtcttagagggggacaacatggaaactcccgttactctgatcaacttctggccagtagattctgcgcctgcctcgtcccctcagctttcacacgatgatactcattcacgcattgaacattatgctagcaggctagcagaaatggaaaacagcaatggatcttatctaaatgatagcatctctcctaatgagagcatagatgatgaacatttgttaatccagcattactgccaaagtttgaaccaggactcccccctgagccagcctcgtagt

SEQ ID NO: 111 - DNA, 3978 bp, synthetic construct
  source 1..3978: mol_type = other DNA
atggccaagtacggcgagcacgaggccagccccgacaacggccagaacgagttcagcgacatcatcaagagccggagcgacgagcacaacgacgtgcagaagaagaccttcaccaagtggatcaacgcccggttcagcaagagcggcaagccccccatcaacgacatgttcaccgacctgaaggacggccggaagctgctggacctgctggagggcctgaccggcaccagcctgcccaaggagcggggcagcacccgggtgcacgccctgaacaacgtgaaccgggtgctgcaggtgctgcaccagaacaacgtggagctggtgaacatcggcggcaccgacatcgtggacggcaaccacaagctgaccctgggcctgctgtggagcatcatcctgcactggcaggtgaaggacgtgatgaaggacgtgatgagcgacctgcagcagaccaacagcgagaagatcctgctgagctgggtgcggcagaccacccggccctacagccaggtgaacgtgctgaacttcaccaccagctggaccgacggcctggccttcaacgccgtgctgcaccggcacaagcccgacctgttcagctgggacaaggtggtgaagatgagccccatcgagcggctggagcacgccttcagcaaggcccagacctacctgggcatcgagaagctgctggaccccgaggacgtggccgtgcagctgcccgacaagaagagcatcatcatgtacctgaccagcctgttcgaggtgctgccccagcaggtgaccatcgacgccatccgggaggtggagaccctgccccggaagtacaagaaggagtgcgaggaggaggccatcaacatccagagcaccgcccccgaggaggagcacgagagcccccgggccgagacccccagcaccgtgaccgaggtggacatggacctggacagctaccagatcgccctggaggaggtgctgacctggctgctgagcgccgaggacaccttccaggagcaggacgacatcagcgacgacgtggaggaggtgaaggaccagttcgccacccacgaggccttcatgatggagctgaccgcccaccagagcagcgtgggcagcgtgctgcaggccggcaaccagctgatcacccagggcaccctgagcgacgaggaggagttcgagatccaggagcagatgaccctgctgaacgcccggtgggaggccctgcgggtggagagcatggaccggcagagccggctgcacgacgtgctgatggagctgcagaagaagcagctgcagcagctgagcgcctggctgaccctgaccgaggagcggatccagaagatggagacctgccccctggacgacgacgtgaagagcctgcagaagctgctggaggagcacaagagcctgcagagcgacctggaggccgagcaggtgaaggtgaacagcctgacccacatggtggtgatcgtggacgagaacagcggcgagagcgccaccgccatcctggaggaccagctgcagaagctgggcgagcggtggaccgccgtgtgccggtggaccgaggagcggtggaaccggctgcaggagatcgccgctagcgccatgatggtgatgaccgaggacatgcccctggagatcagctacgtgcccagcacctacctgaccgagatcacccacgtgagccaggccctgctggaggtggagcagctgctgaacgcccccgacctgtgcgccaaggacttcgaggacctgttcaagcaggaggagagcctgaagaacatcaaggacagcctgcagcagagcagcggccggatcgacatcatccacagcaagaagaccgccgccctgcagagcgccacccccgtggagcgggtgaagctgcaggaggccctgagccagctggacttccagtgggagaaggtgaacaagatgtacaaggaccggcagggccggttcgaccggagcgtggagaagtggcggcggttccactacgacatcaagatcttcaaccagtggctgaccgaggccgagcagttcctgcggaagacccagatccccgagaactgggagcacgccaagtacaagtggtacctgaaggagctgcaggacggcatcggccagcggcagaccgtggtgcggaccctgaacgccaccggcgaggagatcatccagcagagcagcaagaccgacgccagcatcctgcaggagaagctgggcagcctgaacctgcggtggcaggaggtgtgcaagcagctgagcgaccggaagaagcggctggaggagcagaagtggcagcggaagatcgacgagaccctggagcggctgcaggagctgcaggaggccaccgacgagctggacctgaagctgcggcaggccgaggtgatcaagggcagctggcagcccgtgggcgacctgctgatcgacagcctgcaggaccacctggagaaggtgaaggccctgcggggcgagatcgcccccctgaaggagaacgtgagccacgtgaacgacctggcccggcagctgaccaccctgggcatccagctgagcccctacaacctgagcaccctggaggacctgaacacccggtggaagctgctgcaggtggccgtggaggaccgggtgcggcagctgcacgaggcccaccgggacttcggccccgccagccagcacttcctgagcaccagcgtgcagggcccctgggagcgggccatcagccccaacaaggtgccctactacatcaaccacgagacccagaccacctgctgggaccaccccaagatgaccgagctgtaccagagcctggccgacctgaacaacgtgcggttcagcgcctaccggaccgccatgaagctgcggcggctgcagaaggccctgtgcctggacctgctgagcctgagcgccgcctgcgacgccctggaccagcacaacctgaagcagaacgaccagcccatggacatcctgcagatcatcaactgcctgaccaccatctacgaccggctggagcaggagcacaacaacctggtgaacgtgcccctgtgcgtggacatgtgcctgaactggctgctgaacgtgtacgacaccggccggaccggccggatccgggtgctgagcttcaagaccggcatcatcagcctgtgcaaggcccacctggaggacaagtaccggtacctgttcaagcaggtggccagcagcaccggcttctgcgaccagcggcggctgggcctgctgctgcacgacagcatccagatcccccggcagctgggcgaggtggccagcttcggcggcagcaacatcgagcccagcgtgcggagctgcttccagttcgccaacaacaagcccgagatcgaggccgccctgttcctggactggatgcggctggagccccagagcatggtgtggctgcccgtgctgcaccgggtggccgccgccgagaccgccaagcaccaggccaagtgcaacatctgcaaggagtgccccatcatcggcttccggtaccggagcctgaagcacttcaactacgacatctgccagagctgcttcttcagcggccgggtggccaagggccacaagatgcactaccccatggtggagtactgcacccccaccaccagcggcgaggacgtgcgggacttcgccaaggtgctgaagaacaagttccggaccaagcggtacttcgccaagcacccccggatgggctacctgcccgtgcagaccgtgctggagggcgacaacatggagacccccgtgaccctgatcaacttctggcccgtggacagcgcccccgccagcagcccccagctgagccacgacgacacccacagccggatcgagcactacgccagccggctggccgagatggagaacagcaacggcagctacctgaacgacagcatcagccccaacgagagcatcgacgacgagcacctgctgatccagcactactgccagagcctgaaccaggacagccccctgagccagccccggagc

SEQ ID NO: 112 - DNA, 3657 bp, Homo sapiens
  source 1..3657: mol_type = genomic DNA
atggccaagtatggagaacatgaagccagtcctgacaatgggcagaacgaattcagtgatatcattaagtccagatctgatgaacacaatgacgtacagaagaaaacctttaccaaatggataaatgctcgattttcaaagagtgggaaaccacccatcaatgatatgttcacagacctcaaagatggaaggaagctattggatcttctagaaggcctcacaggaacatcactgccaaaggaacgtggttccacaagggtacatgccttaaataacgtcaacagagtgctgcaggttttacatcagaacaatgtggaattagtgaatatagggggaactgacattgtggatggaaatcacaaactgactttggggttactttggagcatcattttgcactggcaggtgaaagatgtcatgaaggatgtcatgtcggacctgcagcagacgaacagtgagaagatcctgctcagctgggtgcgtcagaccaccaggccctacagccaagtcaacgtcctcaacttcaccaccagctggacagatggactcgcctttaatgctgtcctccaccgacataaacctgatctcttcagctgggataaagttgtcaaaatgtcaccaattgagagacttgaacatgccttcagcaaggctcaaacttatttgggaattgaaaagctgttagatcctgaagatgttgccgttcagcttcctgacaagaaatccataattatgtatttaacatctttgtttgaggtgctacctcagcaagtcaccatagacgccatccgtgaggtagagacactcccaaggaaatataaaaaagaatgtgaagaagaggcaattaatatacagagtacagcgcctgaggaggagcatgagagtccccgagctgaaactcccagcactgtcactgaggttgacatggatctggacagctatcagattgcgttggaggaagtgctgacctggttgctttctgctgaggacactttccaggagcaggatgatatttctgatgatgttgaagaagtcaaagaccagtttgcaacccatgaagcttttatgatggaactgactgcacaccagagcagtgtgggcagcgtcctgcaggcaggcaaccaactgataacacaaggaactctgtcagacgaagaagaatttgagattcaggaacagatgaccctgctgaatgctagatgggaggctcttagggtggagagtatggacagacagtcccggctgcacgatgtgctgatggaactgcagaagaagcaactgcagcagctctccgcctggttaacactcacagaggagcgcattcagaagatggaaacttgccccctggatgatgatgtaaaatctctacaaaagctgctagaagaacataaaagtttgcaaagtgatcttgaggctgaacaggtgaaagtaaattcactaactcacatggtggtcattgttgatgaaaacagtggtgagagtgctacagctatcctagaagaccagttacagaaacttggtgagcgctggacagcagtatgccgttggactgaagaacgctggaataggttacaagaaatcgccgctagcgccagttctgaccagtggaagcgtctgcacctttctctgcaggaacttctggtgtggctacagctgaaagatgatgaattaagccggcaggcacctattggaggcgactttccagcagttcagaagcagaacgatgtacatagggccttcaagagggaattgaaaactaaagaacctgtaatcatgagtactcttgagactgtacgaatatttctgacagagcagcctttggaaggactagagaaactctaccaggagcccagagagctgcctcctgaggagagagcccagaatgtcactcggcttctacgaaagcaggctgaggaggtcaatactgagtgggaaaaattgaacctgcactccgctgactggcagagaaaaatagatgagacccttgaaagactccgggaacttcaagaggccacggatgagctggacctcaagctgcgccaagctgaggtgatcaagggatcctggcagcccgtgggcgatctcctcattgactctctccaagatcacctcgagaaagtcaaggcacttcgaggagaaattgcgcctctgaaagagaacgtgagccacgtcaatgaccttgctcgccagcttaccactttgggcattcagctctcaccgtataacctcagcactctggaagacctgaacaccagatggaagcttctgcaggtggccgtcgaggaccgagtcaggcagctgcatgaagcccacagggactttggtccagcatctcagcactttctttccacgtctgtccagggtccctgggagagagccatctcgccaaacaaagtgccctactatatcaaccacgagactcaaacaacttgctgggaccatcccaaaatgacagagctctaccagtctttagctgacctgaataatgtcagattctcagcttataggactgccatgaaactccgaagactgcagaaggccctttgcttggatctcttgagcctgtcagctgcatgtgatgccttggaccagcacaacctcaagcaaaatgaccagcccatggatatcctgcagattattaattgtttgaccactatttatgaccgcctggagcaagagcacaacaatttggtcaacgtccctctctgcgtggatatgtgtctgaactggctgctgaatgtttatgatacgggacgaacagggaggatccgtgtcctgtcttttaaaactggcatcatttccctgtgtaaagcacatttggaagacaagtacagataccttttcaagcaagtggcaagttcaacaggattttgtgaccagcgcaggctgggcctccttctgcatgattctatccaaattccaagacagttgggtgaagttgcatcctttgggggcagtaacattgagccaagtgtccggagctgcttccaatttgctaataataagccagagatcgaagcggccctcttcctagactggatgagactggaaccccagtccatggtgtggctgcccgtcctgcacagagtggctgctgcagaaactgccaagcatcaggccaaatgtaacatctgcaaagagtgtccaatcattggattcaggtacaggagtctaaagcactttaattatgacatctgccaaagctgctttttttctggtcgagttgcaaaaggccataaaatgcactatcccatggtggaatattgcactccgactacatcaggagaagatgttcgagactttgccaaggtactaaaaaacaaatttcgaaccaaaaggtattttgcgaagcatccccgaatgggctacctgccagtgcagactgtcttagagggggacaacatggaaactcccgttactctgatcaacttctggccagtagattctgcgcctgcctcgtcccctcagctttcacacgatgatactcattcacgcattgaacattatgctagcaggctagcagaaatggaaaacagcaatggatcttatctaaatgatagcatctctcctaatgagagcatagatgatgaacatttgttaatccagcattactgccaaagtttgaaccaggactcccccctgagccagcctcgtagt

SEQ ID NO: 113 - DNA, 3657 bp, synthetic construct
  source 1..3657: mol_type = other DNA
atggccaagtacggcgagcacgaggccagccccgacaacggccagaacgagttcagcgacatcatcaagagccggagcgacgagcacaacgacgtgcagaagaagaccttcaccaagtggatcaacgcccggttcagcaagagcggcaagccccccatcaacgacatgttcaccgacctgaaggacggccggaagctgctggacctgctggagggcctgaccggcaccagcctgcccaaggagcggggcagcacccgggtgcacgccctgaacaacgtgaaccgggtgctgcaggtgctgcaccagaacaacgtggagctggtgaacatcggcggcaccgacatcgtggacggcaaccacaagctgaccctgggcctgctgtggagcatcatcctgcactggcaggtgaaggacgtgatgaaggacgtgatgagcgacctgcagcagaccaacagcgagaagatcctgctgagctgggtgcggcagaccacccggccctacagccaggtgaacgtgctgaacttcaccaccagctggaccgacggcctggccttcaacgccgtgctgcaccggcacaagcccgacctgttcagctgggacaaggtggtgaagatgagccccatcgagcggctggagcacgccttcagcaaggcccagacctacctgggcatcgagaagctgctggaccccgaggacgtggccgtgcagctgcccgacaagaagagcatcatcatgtacctgaccagcctgttcgaggtgctgccccagcaggtgaccatcgacgccatccgggaggtggagaccctgccccggaagtacaagaaggagtgcgaggaggaggccatcaacatccagagcaccgcccccgaggaggagcacgagagcccccgggccgagacccccagcaccgtgaccgaggtggacatggacctggacagctaccagatcgccctggaggaggtgctgacctggctgctgagcgccgaggacaccttccaggagcaggacgacatcagcgacgacgtggaggaggtgaaggaccagttcgccacccacgaggccttcatgatggagctgaccgcccaccagagcagcgtgggcagcgtgctgcaggccggcaaccagctgatcacccagggcaccctgagcgacgaggaggagttcgagatccaggagcagatgaccctgctgaacgcccggtgggaggccctgcgggtggagagcatggaccggcagagccggctgcacgacgtgctgatggagctgcagaagaagcagctgcagcagctgagcgcctggctgaccctgaccgaggagcggatccagaagatggagacctgccccctggacgacgacgtgaagagcctgcagaagctgctggaggagcacaagagcctgcagagcgacctggaggccgagcaggtgaaggtgaacagcctgacccacatggtggtgatcgtggacgagaacagcggcgagagcgccaccgccatcctggaggaccagctgcagaagctgggcgagcggtggaccgccgtgtgccggtggaccgaggagcggtggaaccggctgcaggagatcgccgctagcgccagcagcgaccagtggaagcggctgcacctgagcctgcaggagctgctggtgtggctgcagctgaaggacgacgagctgagccggcaggcccccatcggcggcgacttccccgccgtgcagaagcagaacgacgtgcaccgggccttcaagcgggagctgaagaccaaggagcccgtgatcatgagcaccctggagaccgtgcggatcttcctgaccgagcagcccctggagggcctggagaagctgtaccaggagccccgggagctgccccccgaggagcgggcccagaacgtgacccggctgctgcggaagcaggccgaggaggtgaacaccgagtgggagaagctgaacctgcacagcgccgactggcagcggaagatcgacgagaccctggagcggctgcaggagctgcaggaggccaccgacgagctggacctgaagctgcggcaggccgaggtgatcaagggcagctggcagcccgtgggcgacctgctgatcgacagcctgcaggaccacctggagaaggtgaaggccctgcggggcgagatcgcccccctgaaggagaacgtgagccacgtgaacgacctggcccggcagctgaccaccctgggcatccagctgagcccctacaacctgagcaccctggaggacctgaacacccggtggaagctgctgcaggtggccgtggaggaccgggtgcggcagctgcacgaggcccaccgggacttcggccccgccagccagcacttcctgagcaccagcgtgcagggcccctgggagcgggccatcagccccaacaaggtgccctactacatcaaccacgagacccagaccacctgctgggaccaccccaagatgaccgagctgtaccagagcctggccgacctgaacaacgtgcggttcagcgcctaccggaccgccatgaagctgcggcggctgcagaaggccctgtgcctggacctgctgagcctgagcgccgcctgcgacgccctggaccagcacaacctgaagcagaacgaccagcccatggacatcctgcagatcatcaactgcctgaccaccatctacgaccggctggagcaggagcacaacaacctggtgaacgtgcccctgtgcgtggacatgtgcctgaactggctgctgaacgtgtacgacaccggccggaccggccggatccgggtgctgagcttcaagaccggcatcatcagcctgtgcaaggcccacctggaggacaagtaccggtacctgttcaagcaggtggccagcagcaccggcttctgcgaccagcggcggctgggcctgctgctgcacgacagcatccagatcccccggcagctgggcgaggtggccagcttcggcggcagcaacatcgagcccagcgtgcggagctgcttccagttcgccaacaacaagcccgagatcgaggccgccctgttcctggactggatgcggctggagccccagagcatggtgtggctgcccgtgctgcaccgggtggccgccgccgagaccgccaagcaccaggccaagtgcaacatctgcaaggagtgccccatcatcggcttccggtaccggagcctgaagcacttcaactacgacatctgccagagctgcttcttcagcggccgggtggccaagggccacaagatgcactaccccatggtggagtactgcacccccaccaccagcggcgaggacgtgcgggacttcgccaaggtgctgaagaacaagttccggaccaagcggtacttcgccaagcacccccggatgggctacctgcccgtgcagaccgtgctggagggcgacaacatggagacccccgtgaccctgatcaacttctggcccgtggacagcgcccccgccagcagcccccagctgagccacgacgacacccacagccggatcgagcactacgccagccggctggccgagatggagaacagcaacggcagctacctgaacgacagcatcagccccaacgagagcatcgacgacgagcacctgctgatccagcactactgccagagcctgaaccaggacagccccctgagccagccccggagc

SEQ ID NO: 114 - DNA, 3846 bp, Homo sapiens
  source 1..3846: mol_type = genomic DNA
atggccaagtatggagaacatgaagccagtcctgacaatgggcagaacgaattcagtgatatcattaagtccagatctgatgaacacaatgacgtacagaagaaaacctttaccaaatggataaatgctcgattttcaaagagtgggaaaccacccatcaatgatatgttcacagacctcaaagatggaaggaagctattggatcttctagaaggcctcacaggaacatcactgccaaaggaacgtggttccacaagggtacatgccttaaataacgtcaacagagtgctgcaggttttacatcagaacaatgtggaattagtgaatatagggggaactgacattgtggatggaaatcacaaactgactttggggttactttggagcatcattttgcactggcaggtgaaagatgtcatgaaggatgtcatgtcggacctgcagcagacgaacagtgagaagatcctgctcagctgggtgcgtcagaccaccaggccctacagccaagtcaacgtcctcaacttcaccaccagctggacagatggactcgcctttaatgctgtcctccaccgacataaacctgatctcttcagctgggataaagttgtcaaaatgtcaccaattgagagacttgaacatgccttcagcaaggctcaaacttatttgggaattgaaaagctgttagatcctgaagatgttgccgttcagcttcctgacaagaaatccataattatgtatttaacatctttgtttgaggtgctacctcagcaagtcaccatagacgccatccgtgaggtagagacactcccaaggaaatataaaaaagaatgtgaagaagaggcaattaatatacagagtacagcgcctgaggaggagcatgagagtccccgagctgaaactcccagcactgtcactgaggttgacatggatctggacagctatcagattgcgttggaggaagtgctgacctggttgctttctgctgaggacactttccaggagcaggatgatatttctgatgatgttgaagaagtcaaagaccagtttgcaacccatgaagcttttatgatggaactgactgcacaccagagcagtgtgggcagcgtcctgcaggcaggcaaccaactgataacacaaggaactctgtcagacgaagaagaatttgagattcaggaacagatgaccctgctgaatgctagatgggaggctcttagggtggagagtatggacagacagtcccggctgcacgatgtgctgatggaactgcagaagaagcaactgcagcagctctccgcctggttaacactcacagaggagcgcattcagaagatggaaacttgccccctggatgatgatgtaaaatctctacaaaagctgctagaagaacataaaagtttgcaaagtgatcttgaggctgaacaggtgaaagtaaattcactaactcacatggtggtcattgttgatgaaaacagtggtgagagtgctacagctatcctagaagaccagttacagaaacttggtgagcgctggacagcagtatgccgttggactgaagaacgctggaataggttacaagaaatcgccgctagcgccagttctgaccagtggaagcgtctgcacctttctctgcaggaacttctggtgtggctacagctgaaagatgatgaattaagccggcaggcacctattggaggcgactttccagcagttcagaagcagaacgatgtacatagggccttcaagagggaattgaaaactaaagaacctgtaatcatgagtactcttgagactgtacgaatatttctgacagagcagcctttggaaggactagagaaactctaccaggagcccagagagctgcctcctgaggagagagcccagaatgtcactcggcttctacgaaagcaggctgaggaggtcaatactgagtgggaaaaattgaacctgcactccgctgactggcagagaaaaatagatgagacccttgaaagactccgggaacttcaagaggccacggatgagctggacctcaagctgcgccaagctgaggtgatcaagggatcctggcagcccgtgggcgatctcctcattgactctctccaagatcacctcgagaaagtcaaggcacttcgaggagaaattgcgcctctgaaagagaacgtgagccacgtcaatgaccttgctcgccagcttaccactttgggcattcagctctcaccgtataacctcagcactctggaagacctgaacaccagatggaagcttctgcaggtggccgtcgaggaccgagtcaggcagctgcatgaagcccacagggactttggtccagcatctcagcactttctttccacgtctgtccagggtccctgggagagagccatctcgccaaacaaagtgccctactatatcaaccacgagactcaaacaacttgctgggaccatcccaaaatgacagagctctaccagtctttagctgacctgaataatgtcagattctcagcttataggactgccatgaaactccgaagactgcagaaggccctttgcttggatctcttgagcctgtcagctgcatgtgatgccttggaccagcacaacctcaagcaaaatgaccagcccatggatatcctgcagattattaattgtttgaccactatttatgaccgcctggagcaagagcacaacaatttggtcaacgtccctctctgcgtggatatgtgtctgaactggctgctgaatgtttatgatacgggacgaacagggaggatccgtgtcctgtcttttaaaactggcatcatttccctgtgtaaagcacatttggaagacaagtacagataccttttcaagcaagtggcaagttcaacaggattttgtgaccagcgcaggctgggcctccttctgcatgattctatccaaattccaagacagttgggtgaagttgcatcctttgggggcagtaacattgagccaagtgtccggagctgcttccaatttgctaataataagccagagatcgaagcggccctcttcctagactggatgagactggaaccccagtccatggtgtggctgcccgtcctgcacagagtggctgctgcagaaactgccaagcatcaggccaaatgtaacatctgcaaagagtgtccaatcattggattcaggtacaggagtctaaagcactttaattatgacatctgccaaagctgctttttttctggtcgagttgcaaaaggccataaaatgcactatcccatggtggaatattgcactccgactacatcaggagaagatgttcgagactttgccaaggtactaaaaaacaaatttcgaaccaaaaggtattttgcgaagcatccccgaatgggctacctgccagtgcagactgtcttagagggggacaacatggaaactcccgttactctgatcaacttctggccagtagattctgcgcctgcctcgtcccctcagctttcacacgatgatactcattcacgcattgaacattatgctagcaggctagcagaaatggaaaacagcaatggatcttatctaaatgatagcatctctcctaatgagagcatagatgatgaacatttgttaatccagcattactgccaaagtttgaaccaggactcccccctgagccagcctcgtagtcctgcccagatcttgatttccttagagagtgaggaaagaggggagctagagagaatcctagcagatcttgaggaagaaaacaggaatctgcaagcagaatatgaccgtctaaagcagcagcacgaacataaaggcctgtccccactgccgtcccctcctgaaatgatgcccacctctccccagagtccc

SEQ ID NO: 115 - DNA, 3846 bp, synthetic construct
  source 1..3846: mol_type = other DNA
atggccaagtacggcgagcacgaggccagccccgacaacggccagaacgagttcagcgacatcatcaagagccggagcgacgagcacaacgacgtgcagaagaagaccttcaccaagtggatcaacgcccggttcagcaagagcggcaagccccccatcaacgacatgttcaccgacctgaaggacggccggaagctgctggacctgctggagggcctgaccggcaccagcctgcccaaggagcggggcagcacccgggtgcacgccctgaacaacgtgaaccgggtgctgcaggtgctgcaccagaacaacgtggagctggtgaacatcggcggcaccgacatcgtggacggcaaccacaagctgaccctgggcctgctgtggagcatcatcctgcactggcaggtgaaggacgtgatgaaggacgtgatgagcgacctgcagcagaccaacagcgagaagatcctgctgagctgggtgcggcagaccacccggccctacagccaggtgaacgtgctgaacttcaccaccagctggaccgacggcctggccttcaacgccgtgctgcaccggcacaagcccgacctgttcagctgggacaaggtggtgaagatgagccccatcgagcggctggagcacgccttcagcaaggcccagacctacctgggcatcgagaagctgctggaccccgaggacgtggccgtgcagctgcccgacaagaagagcatcatcatgtacctgaccagcctgttcgaggtgctgccccagcaggtgaccatcgacgccatccgggaggtggagaccctgccccggaagtacaagaaggagtgcgaggaggaggccatcaacatccagagcaccgcccccgaggaggagcacgagagcccccgggccgagacccccagcaccgtgaccgaggtggacatggacctggacagctaccagatcgccctggaggaggtgctgacctggctgctgagcgccgaggacaccttccaggagcaggacgacatcagcgacgacgtggaggaggtgaaggaccagttcgccacccacgaggccttcatgatggagctgaccgcccaccagagcagcgtgggcagcgtgctgcaggccggcaaccagctgatcacccagggcaccctgagcgacgaggaggagttcgagatccaggagcagatgaccctgctgaacgcccggtgggaggccctgcgggtggagagcatggaccggcagagccggctgcacgacgtgctgatggagctgcagaagaagcagctgcagcagctgagcgcctggctgaccctgaccgaggagcggatccagaagatggagacctgccccctggacgacgacgtgaagagcctgcagaagctgctggaggagcacaagagcctgcagagcgacctggaggccgagcaggtgaaggtgaacagcctgacccacatggtggtgatcgtggacgagaacagcggcgagagcgccaccgccatcctggaggaccagctgcagaagctgggcgagcggtggaccgccgtgtgccggtggaccgaggagcggtggaaccggctgcaggagatcgccgctagcgccagcagcgaccagtggaagcggctgcacctgagcctgcaggagctgctggtgtggctgcagctgaaggacgacgagctgagccggcaggcccccatcggcggcgacttccccgccgtgcagaagcagaacgacgtgcaccgggccttcaagcgggagctgaagaccaaggagcccgtgatcatgagcaccctggagaccgtgcggatcttcctgaccgagcagcccctggagggcctggagaagctgtaccaggagccccgggagctgccccccgaggagcgggcccagaacgtgacccggctgctgcggaagcaggccgaggaggtgaacaccgagtgggagaagctgaacctgcacagcgccgactggcagcggaagatcgacgagaccctggagcggctgcaggagctgcaggaggccaccgacgagctggacctgaagctgcggcaggccgaggtgatcaagggcagctggcagcccgtgggcgacctgctgatcgacagcctgcaggaccacctggagaaggtgaaggccctgcggggcgagatcgcccccctgaaggagaacgtgagccacgtgaacgacctggcccggcagctgaccaccctgggcatccagctgagcccctacaacctgagcaccctggaggacctgaacacccggtggaagctgctgcaggtggccgtggaggaccgggtgcggcagctgcacgaggcccaccgggacttcggccccgccagccagcacttcctgagcaccagcgtgcagggcccctgggagcgggccatcagccccaacaaggtgccctactacatcaaccacgagacccagaccacctgctgggaccaccccaagatgaccgagctgtaccagagcctggccgacctgaacaacgtgcggttcagcgcctaccggaccgccatgaagctgcggcggctgcagaaggccctgtgcctggacctgctgagcctgagcgccgcctgcgacgccctggaccagcacaacctgaagcagaacgaccagcccatggacatcctgcagatcatcaactgcctgaccaccatctacgaccggctggagcaggagcacaacaacctggtgaacgtgcccctgtgcgtggacatgtgcctgaactggctgctgaacgtgtacgacaccggccggaccggccggatccgggtgctgagcttcaagaccggcatcatcagcctgtgcaaggcccacctggaggacaagtaccggtacctgttcaagcaggtggccagcagcaccggcttctgcgaccagcggcggctgggcctgctgctgcacgacagcatccagatcccccggcagctgggcgaggtggccagcttcggcggcagcaacatcgagcccagcgtgcggagctgcttccagttcgccaacaacaagcccgagatcgaggccgccctgttcctggactggatgcggctggagccccagagcatggtgtggctgcccgtgctgcaccgggtggccgccgccgagaccgccaagcaccaggccaagtgcaacatctgcaaggagtgccccatcatcggcttccggtaccggagcctgaagcacttcaactacgacatctgccagagctgcttcttcagcggccgggtggccaagggccacaagatgcactaccccatggtggagtactgcacccccaccaccagcggcgaggacgtgcgggacttcgccaaggtgctgaagaacaagttccggaccaagcggtacttcgccaagcacccccggatgggctacctgcccgtgcagaccgtgctggagggcgacaacatggagacccccgtgaccctgatcaacttctggcccgtggacagcgcccccgccagcagcccccagctgagccacgacgacacccacagccggatcgagcactacgccagccggctggccgagatggagaacagcaacggcagctacctgaacgacagcatcagccccaacgagagcatcgacgacgagcacctgctgatccagcactactgccagagcctgaaccaggacagccccctgagccagccccggagccccgcccagatcctgatcagcctggagagcgaggagcggggcgagctggagcggatcctggccgacctggaggaggagaaccggaacctgcaggccgagtacgaccggctgaagcagcagcacgagcacaagggcctgagccccctgcccagcccccccgagatgatgcccaccagcccccagagcccc

SEQ ID NO: 116 - DNA, 3990 bp, Homo sapiens
  source 1..3990: mol_type = genomic DNA
atggccaagtatggagaacatgaagccagtcctgacaatgggcagaacgaattcagtgatatcattaagtccagatctgatgaacacaatgacgtacagaagaaaacctttaccaaatggataaatgctcgattttcaaagagtgggaaaccacccatcaatgatatgttcacagacctcaaagatggaaggaagctattggatcttctagaaggcctcacaggaacatcactgccaaaggaacgtggttccacaagggtacatgccttaaataacgtcaacagagtgctgcaggttttacatcagaacaatgtggaattagtgaatatagggggaactgacattgtggatggaaatcacaaactgactttggggttactttggagcatcattttgcactggcaggtgaaagatgtcatgaaggatgtcatgtcggacctgcagcagacgaacagtgagaagatcctgctcagctgggtgcgtcagaccaccaggccctacagccaagtcaacgtcctcaacttcaccaccagctggacagatggactcgcctttaatgctgtcctccaccgacataaacctgatctcttcagctgggataaagttgtcaaaatgtcaccaattgagagacttgaacatgccttcagcaaggctcaaacttatttgggaattgaaaagctgttagatcctgaagatgttgccgttcagcttcctgacaagaaatccataattatgtatttaacatctttgtttgaggtgctacctcagcaagtcaccatagacgccatccgtgaggtagagacactcccaaggaaatataaaaaagaatgtgaagaagaggcaattaatatacagagtacagcgcctgaggaggagcatgagagtccccgagctgaaactcccagcactgtcactgaggttgacatggatctggacagctatcagattgcgttggaggaagtgctgacctggttgctttctgctgaggacactttccaggagcaggatgatatttctgatgatgttgaagaagtcaaagaccagtttgcaacccatgaagcttttatgatggaactgactgcacaccagagcagtgtgggcagcgtcctgcaggcaggcaaccaactgataacacaaggaactctgtcagacgaagaagaatttgagattcaggaacagatgaccctgctgaatgctagatgggaggctcttagggtggagagtatggacagacagtcccggctgcacgatgtgctgatggaactgcagaagaagcaactgcagcagctctccgcctggttaacactcacagaggagcgcattcagaagatggaaacttgccccctggatgatgatgtaaaatctctacaaaagctgctagaagaacataaaagtttgcaaagtgatcttgaggctgaacaggtgaaagtaaattcactaactcacatggtggtcattgttgatgaaaacagtggtgagagtgctacagctatcctagaagaccagttacagaaacttggtgagcgctggacagcagtatgccgttggactgaagaacgctggaataggttacaagaaatcaatatattgtggcaggaattattggaagaacagtgcttgttgaaagcttggttaaccgaaaaagaagaggctttaaataaagtccagacaagcaacttcaaagaccaaaaggaactaagtgtcagtgttcgacgtctggctattttgaaggaagacatggaaatgaagcgtcaaacattggatcagctgagtgagattggccaggatgtgggacaattacttgataattccaaggcatctaagaagatcaacagtgactcagaggaactgactcaaagatgggattctttggttcagagactagaagattcctccaaccaggtgactcaggctgccgctagcgccagttctgaccagtggaagcgtctgcacctttctctgcaggaacttctggtgtggctacagctgaaagatgatgaattaagccggcaggcacctattggaggcgactttccagcagttcagaagcagaacgatgtacatagggccttcaagagggaattgaaaactaaagaacctgtaatcatgagtactcttgagactgtacgaatatttctgacagagcagcctttggaaggactagagaaactctaccaggagcccagagagctgcctcctgaggagagagcccagaatgtcactcggcttctacgaaagcaggctgaggaggtcaatactgagtgggaaaaattgaacctgcactccgctgactggcagagaaaaatagatgagacccttgaaagactccgggaacttcaagaggccacggatgagctggacctcaagctgcgccaagctgaggtgatcaagggatcctggcagcccgtgggcgatctcctcattgactctctccaagatcacctcgagaaagtcaaggcacttcgaggagaaattgcgcctctgaaagagaacgtgagccacgtcaatgaccttgctcgccagcttaccactttgggcattcagctctcaccgtataacctcagcactctggaagacctgaacaccagatggaagcttctgcaggtggccgtcgaggaccgagtcaggcagctgcatgaagcccacagggactttggtccagcatctcagcactttctttccacgtctgtccagggtccctgggagagagccatctcgccaaacaaagtgccctactatatcaaccacgagactcaaacaacttgctgggaccatcccaaaatgacagagctctaccagtctttagctgacctgaataatgtcagattctcagcttataggactgccatgaaactccgaagactgcagaaggccctttgcttggatctcttgagcctgtcagctgcatgtgatgccttggaccagcacaacctcaagcaaaatgaccagcccatggatatcctgcagattattaattgtttgaccactatttatgaccgcctggagcaagagcacaacaatttggtcaacgtccctctctgcgtggatatgtgtctgaactggctgctgaatgtttatgatacgggacgaacagggaggatccgtgtcctgtcttttaaaactggcatcatttccctgtgtaaagcacatttggaagacaagtacagataccttttcaagcaagtggcaagttcaacaggattttgtgaccagcgcaggctgggcctccttctgcatgattctatccaaattccaagacagttgggtgaagttgcatcctttgggggcagtaacattgagccaagtgtccggagctgcttccaatttgctaataataagccagagatcgaagcggccctcttcctagactggatgagactggaaccccagtccatggtgtggctgcccgtcctgcacagagtggctgctgcagaaactgccaagcatcaggccaaatgtaacatctgcaaagagtgtccaatcattggattcaggtacaggagtctaaagcactttaattatgacatctgccaaagctgctttttttctggtcgagttgcaaaaggccataaaatgcactatcccatggtggaatattgcactccgactacatcaggagaagatgttcgagactttgccaaggtactaaaaaacaaatttcgaaccaaaaggtattttgcgaagcatccccgaatgggctacctgccagtgcagactgtcttagagggggacaacatggaaactcccgttactctgatcaacttctggccagtagattctgcgcctgcctcgtcccctcagctttcacacgatgatactcattcacgcattgaacattatgctagcaggctagcagaaatggaaaacagcaatggatcttatctaaatgatagcatctctcctaatgagagcatagatgatgaacatttgttaatccagcattactgccaaagtttgaaccaggactcccccctgagccagcctcgtagt

SEQ ID NO: 117 - DNA, 3990 bp, synthetic construct
  source 1..3990: mol_type = other DNA
atggccaagtacggcgagcacgaggccagccccgacaacggccagaacgagttcagcgacatcatcaagagccggagcgacgagcacaacgacgtgcagaagaagaccttcaccaagtggatcaacgcccggttcagcaagagcggcaagccccccatcaacgacatgttcaccgacctgaaggacggccggaagctgctggacctgctggagggcctgaccggcaccagcctgcccaaggagcggggcagcacccgggtgcacgccctgaacaacgtgaaccgggtgctgcaggtgctgcaccagaacaacgtggagctggtgaacatcggcggcaccgacatcgtggacggcaaccacaagctgaccctgggcctgctgtggagcatcatcctgcactggcaggtgaaggacgtgatgaaggacgtgatgagcgacctgcagcagaccaacagcgagaagatcctgctgagctgggtgcggcagaccacccggccctacagccaggtgaacgtgctgaacttcaccaccagctggaccgacggcctggccttcaacgccgtgctgcaccggcacaagcccgacctgttcagctgggacaaggtggtgaagatgagccccatcgagcggctggagcacgccttcagcaaggcccagacctacctgggcatcgagaagctgctggaccccgaggacgtggccgtgcagctgcccgacaagaagagcatcatcatgtacctgaccagcctgttcgaggtgctgccccagcaggtgaccatcgacgccatccgggaggtggagaccctgccccggaagtacaagaaggagtgcgaggaggaggccatcaacatccagagcaccgcccccgaggaggagcacgagagcccccgggccgagacccccagcaccgtgaccgaggtggacatggacctggacagctaccagatcgccctggaggaggtgctgacctggctgctgagcgccgaggacaccttccaggagcaggacgacatcagcgacgacgtggaggaggtgaaggaccagttcgccacccacgaggccttcatgatggagctgaccgcccaccagagcagcgtgggcagcgtgctgcaggccggcaaccagctgatcacccagggcaccctgagcgacgaggaggagttcgagatccaggagcagatgaccctgctgaacgcccggtgggaggccctgcgggtggagagcatggaccggcagagccggctgcacgacgtgctgatggagctgcagaagaagcagctgcagcagctgagcgcctggctgaccctgaccgaggagcggatccagaagatggagacctgccccctggacgacgacgtgaagagcctgcagaagctgctggaggagcacaagagcctgcagagcgacctggaggccgagcaggtgaaggtgaacagcctgacccacatggtggtgatcgtggacgagaacagcggcgagagcgccaccgccatcctggaggaccagctgcagaagctgggcgagcggtggaccgccgtgtgccggtggaccgaggagcggtggaaccggctgcaggagatcaacatcctgtggcaggagctgctggaggagcagtgcctgctgaaggcctggctgaccgagaaggaggaggccctgaacaaggtgcagaccagcaacttcaaggaccagaaggagctgagcgtgagcgtgcggcggctggccatcctgaaggaggacatggagatgaagcggcagaccctggaccagctgagcgagatcggccaggacgtgggccagctgctggacaacagcaaggccagcaagaagatcaacagcgacagcgaggagctgacccagcggtgggacagcctggtgcagcggctggaggacagcagcaaccaggtgacccaggccgccgctagcgccagcagcgaccagtggaagcggctgcacctgagcctgcaggagctgctggtgtggctgcagctgaaggacgacgagctgagccggcaggcccccatcggcggcgacttccccgccgtgcagaagcagaacgacgtgcaccgggccttcaagcgggagctgaagaccaaggagcccgtgatcatgagcaccctggagaccgtgcggatcttcctgaccgagcagcccctggagggcctggagaagctgtaccaggagccccgggagctgccccccgaggagcgggcccagaacgtgacccggctgctgcggaagcaggccgaggaggtgaacaccgagtgggagaagctgaacctgcacagcgccgactggcagcggaagatcgacgagaccctggagcggctgcaggagctgcaggaggccaccgacgagctggacctgaagctgcggcaggccgaggtgatcaagggcagctggcagcccgtgggcgacctgctgatcgacagcctgcaggaccacctggagaaggtgaaggccctgcggggcgagatcgcccccctgaaggagaacgtgagccacgtgaacgacctggcccggcagctgaccaccctgggcatccagctgagcccctacaacctgagcaccctggaggacctgaacacccggtggaagctgctgcaggtggccgtggaggaccgggtgcggcagctgcacgaggcccaccgggacttcggccccgccagccagcacttcctgagcaccagcgtgcagggcccctgggagcgggccatcagccccaacaaggtgccctactacatcaaccacgagacccagaccacctgctgggaccaccccaagatgaccgagctgtaccagagcctggccgacctgaacaacgtgcggttcagcgcctaccggaccgccatgaagctgcggcggctgcagaaggccctgtgcctggacctgctgagcctgagcgccgcctgcgacgccctggaccagcacaacctgaagcagaacgaccagcccatggacatcctgcagatcatcaactgcctgaccaccatctacgaccggctggagcaggagcacaacaacctggtgaacgtgcccctgtgcgtggacatgtgcctgaactggctgctgaacgtgtacgacaccggccggaccggccggatccgggtgctgagcttcaagaccggcatcatcagcctgtgcaaggcccacctggaggacaagtaccggtacctgttcaagcaggtggccagcagcaccggcttctgcgaccagcggcggctgggcctgctgctgcacgacagcatccagatcccccggcagctgggcgaggtggccagcttcggcggcagcaacatcgagcccagcgtgcggagctgcttccagttcgccaacaacaagcccgagatcgaggccgccctgttcctggactggatgcggctggagccccagagcatggtgtggctgcccgtgctgcaccgggtggccgccgccgagaccgccaagcaccaggccaagtgcaacatctgcaaggagtgccccatcatcggcttccggtaccggagcctgaagcacttcaactacgacatctgccagagctgcttcttcagcggccgggtggccaagggccacaagatgcactaccccatggtggagtactgcacccccaccaccagcggcgaggacgtgcgggacttcgccaaggtgctgaagaacaagttccggaccaagcggtacttcgccaagcacccccggatgggctacctgcccgtgcagaccgtgctggagggcgacaacatggagacccccgtgaccctgatcaacttctggcccgtggacagcgcccccgccagcagcccccagctgagccacgacgacacccacagccggatcgagcactacgccagccggctggccgagatggagaacagcaacggcagctacctgaacgacagcatcagccccaacgagagcatcgacgacgagcacctgctgatccagcactactgccagagcctgaaccaggacagccccctgagccagccccggagc

SEQ ID NO: 118 - DNA, 4242 bp, Homo sapiens
  source 1..4242: mol_type = genomic DNA
atggccaagtatggagaacatgaagccagtcctgacaatgggcagaacgaattcagtgatatcattaagtccagatctgatgaacacaatgacgtacagaagaaaacctttaccaaatggataaatgctcgattttcaaagagtgggaaaccacccatcaatgatatgttcacagacctcaaagatggaaggaagctattggatcttctagaaggcctcacaggaacatcactgccaaaggaacgtggttccacaagggtacatgccttaaataacgtcaacagagtgctgcaggttttacatcagaacaatgtggaattagtgaatatagggggaactgacattgtggatggaaatcacaaactgactttggggttactttggagcatcattttgcactggcaggtgaaagatgtcatgaaggatgtcatgtcggacctgcagcagacgaacagtgagaagatcctgctcagctgggtgcgtcagaccaccaggccctacagccaagtcaacgtcctcaacttcaccaccagctggacagatggactcgcctttaatgctgtcctccaccgacataaacctgatctcttcagctgggataaagttgtcaaaatgtcaccaattgagagacttgaacatgccttcagcaaggctcaaacttatttgggaattgaaaagctgttagatcctgaagatgttgccgttcagcttcctgacaagaaatccataattatgtatttaacatctttgtttgaggtgctacctcagcaagtcaccatagacgccatccgtgaggtagagacactcccaaggaaatataaaaaagaatgtgaagaagaggcaattaatatacagagtacagcgcctgaggaggagcatgagagtccccgagctgaaactcccagcactgtcactgaggttgacatggatctggacagctatcagattgcgttggaggaagtgctgacctggttgctttctgctgaggacactttccaggagcaggatgatatttctgatgatgttgaagaagtcaaagaccagtttgcaacccatgaagcttttatgatggaactgactgcacaccagagcagtgtgggcagcgtcctgcaggcaggcaaccaactgataacacaaggaactctgtcagacgaagaagaatttgagattcaggaacagatgaccctgctgaatgctagatgggaggctcttagggtggagagtatggacagacagtcccggctgcacgatgtgctgatggaactgcagaagaagcaactgcagcagctctccgcctggttaacactcacagaggagcgcattcagaagatggaaacttgccccctggatgatgatgtaaaatctctacaaaagctgctagaagaacataaaagtttgcaaagtgatcttgaggctgaacaggtgaaagtaaattcactaactcacatggtggtcattgttgatgaaaacagtggtgagagtgctacagctatcctagaagaccagttacagaaacttggtgagcgctggacagcagtatgccgttggactgaagaacgctggaataggttacaagaaatcgccgctagcgccagttctgaccagtggaagcgtctgcacctttctctgcaggaacttctggtgtggctacagctgaaagatgatgaattaagccggcaggcacctattggaggcgactttccagcagttcagaagcagaacgatgtacatagggccttcaagagggaattgaaaactaaagaacctgtaatcatgagtactcttgagactgtacgaatatttctgacagagcagcctttggaaggactagagaaactctaccaggagcccagagagctgcctcctgaggagagagcccagaatgtcactcggcttctacgaaagcaggctgaggaggtcaatactgagtgggaaaaattgaacctgcactccgctgactggcagagaaaaatagatgagacccttgaaagactccgggaacttcaagaggccacggatgagctggacctcaagctgcgccaagctgaggtgatcaagggatcctggcagcccgtgggcgatctcctcattgactctctccaagatcacctcgagaaagtcaaggcacttcgaggagaaattgcgcctctgaaagagaacgtgagccacgtcaatgaccttgctcgccagcttaccactttgggcattcagctctcaccgtataacctcagcactctggaagacctgaacaccagatggaagcttctgcaggtggccgtcgaggaccgagtcaggcagctgcatgaagcccacagggactttggtccagcatctcagcactttctttccacgtctgtccagggtccctgggagagagccatctcgccaaacaaagtgccctactatatcaaccacgagactcaaacaacttgctgggaccatcccaaaatgacagagctctaccagtctttagctgacctgaataatgtcagattctcagcttataggactgccatgaaactccgaagactgcagaaggccctttgcttggatctcttgagcctgtcagctgcatgtgatgccttggaccagcacaacctcaagcaaaatgaccagcccatggatatcctgcagattattaattgtttgaccactatttatgaccgcctggagcaagagcacaacaatttggtcaacgtccctctctgcgtggatatgtgtctgaactggctgctgaatgtttatgatacgggacgaacagggaggatccgtgtcctgtcttttaaaactggcatcatttccctgtgtaaagcacatttggaagacaagtacagataccttttcaagcaagtggcaagttcaacaggattttgtgaccagcgcaggctgggcctccttctgcatgattctatccaaattccaagacagttgggtgaagttgcatcctttgggggcagtaacattgagccaagtgtccggagctgcttccaatttgctaataataagccagagatcgaagcggccctcttcctagactggatgagactggaaccccagtccatggtgtggctgcccgtcctgcacagagtggctgctgcagaaactgccaagcatcaggccaaatgtaacatctgcaaagagtgtccaatcattggattcaggtacaggagtctaaagcactttaattatgacatctgccaaagctgctttttttctggtcgagttgcaaaaggccataaaatgcactatcccatggtggaatattgcactccgactacatcaggagaagatgttcgagactttgccaaggtactaaaaaacaaatttcgaaccaaaaggtattttgcgaagcatccccgaatgggctacctgccagtgcagactgtcttagagggggacaacatggaaactcccgttactctgatcaacttctggccagtagattctgcgcctgcctcgtcccctcagctttcacacgatgatactcattcacgcattgaacattatgctagcaggctagcagaaatggaaaacagcaatggatcttatctaaatgatagcatctctcctaatgagagcatagatgatgaacatttgttaatccagcattactgccaaagtttgaaccaggactcccccctgagccagcctcgtagtcctgcccagatcttgatttccttagagagtgaggaaagaggggagctagagagaatcctagcagatcttgaggaagaaaacaggaatctgcaagcagaatatgaccgtctaaagcagcagcacgaacataaaggcctgtccccactgccgtcccctcctgaaatgatgcccacctctccccagagtccccgggatgctgagctcattgctgaggccaagctactgcgtcaacacaaaggccgcctggaagccaggatgcaaatcctggaagaccacaataaacagctggagtcacagttacacaggctaaggcagctgctggagcaaccccaggcagaggccaaagtgaatggcacaacggtgtcctctccttctacctctctacagaggtccgacagcagtcagcctatgctgctccgagtggttggcagtcaaacttcggactccatgggtgaggaagatcttctcagtcctccccaggacacaagcacagggttagaggaggtgatggagcaactcaacaactccttccctagttcaagaggaagaaatacccctggaaagccaatgagagaggacacaatg

SEQ ID NO: 119 - DNA, 4242 bp, synthetic construct
  source 1..4242: mol_type = other DNA
atggccaagtacggcgagcacgaggccagccccgacaacggccagaacgagttcagcgacatcatcaagagccggagcgacgagcacaacgacgtgcagaagaagaccttcaccaagtggatcaacgcccggttcagcaagagcggcaagccccccatcaacgacatgttcaccgacctgaaggacggccggaagctgctggacctgctggagggcctgaccggcaccagcctgcccaaggagcggggcagcacccgggtgcacgccctgaacaacgtgaaccgggtgctgcaggtgctgcaccagaacaacgtggagctggtgaacatcggcggcaccgacatcgtggacggcaaccacaagctgaccctgggcctgctgtggagcatcatcctgcactggcaggtgaaggacgtgatgaaggacgtgatgagcgacctgcagcagaccaacagcgagaagatcctgctgagctgggtgcggcagaccacccggccctacagccaggtgaacgtgctgaacttcaccaccagctggaccgacggcctggccttcaacgccgtgctgcaccggcacaagcccgacctgttcagctgggacaaggtggtgaagatgagccccatcgagcggctggagcacgccttcagcaaggcccagacctacctgggcatcgagaagctgctggaccccgaggacgtggccgtgcagctgcccgacaagaagagcatcatcatgtacctgaccagcctgttcgaggtgctgccccagcaggtgaccatcgacgccatccgggaggtggagaccctgccccggaagtacaagaaggagtgcgaggaggaggccatcaacatccagagcaccgcccccgaggaggagcacgagagcccccgggccgagacccccagcaccgtgaccgaggtggacatggacctggacagctaccagatcgccctggaggaggtgctgacctggctgctgagcgccgaggacaccttccaggagcaggacgacatcagcgacgacgtggaggaggtgaaggaccagttcgccacccacgaggccttcatgatggagctgaccgcccaccagagcagcgtgggcagcgtgctgcaggccggcaaccagctgatcacccagggcaccctgagcgacgaggaggagttcgagatccaggagcagatgaccctgctgaacgcccggtgggaggccctgcgggtggagagcatggaccggcagagccggctgcacgacgtgctgatggagctgcagaagaagcagctgcagcagctgagcgcctggctgaccctgaccgaggagcggatccagaagatggagacctgccccctggacgacgacgtgaagagcctgcagaagctgctggaggagcacaagagcctgcagagcgacctggaggccgagcaggtgaaggtgaacagcctgacccacatggtggtgatcgtggacgagaacagcggcgagagcgccaccgccatcctggaggaccagctgcagaagctgggcgagcggtggaccgccgtgtgccggtggaccgaggagcggtggaaccggctgcaggagatcgccgctagcgccagcagcgaccagtggaagcggctgcacctgagcctgcaggagctgctggtgtggctgcagctgaaggacgacgagctgagccggcaggcccccatcggcggcgacttccccgccgtgcagaagcagaacgacgtgcaccgggccttcaagcgggagctgaagaccaaggagcccgtgatcatgagcaccctggagaccgtgcggatcttcctgaccgagcagcccctggagggcctggagaagctgtaccaggagccccgggagctgccccccgaggagcgggcccagaacgtgacccggctgctgcggaagcaggccgaggaggtgaacaccgagtgggagaagctgaacctgcacagcgccgactggcagagaaaaatagatgagacccttgaaagactccgggaacttcaagaggccacggatgagctggacctcaagctgcgccaagctgaggtgatcaagggatcctggcagcccgtgggcgatctcctcattgactctctccaagatcacctcgagaaagtcaaggcacttcgaggagaaattgcgcctctgaaagagaacgtgagccacgtcaatgaccttgctcgccagcttaccactttgggcattcagctctcaccgtataacctcagcactctggaagacctgaacaccagatggaagcttctgcaggtggccgtcgaggaccgagtcaggcagctgcatgaagcccacagggactttggtccagcatctcagcactttctttccacgtctgtccagggtccctgggagagagccatctcgccaaacaaagtgccctactatatcaaccacgagactcaaacaacttgctgggaccatcccaaaatgacagagctctaccagtctttagctgacctgaataatgtcagattctcagcttataggactgccatgaaactccgaagactgcagaaggccctttgcttggatctcttgagcctgtcagctgcatgtgatgccttggaccagcacaacctcaagcaaaatgaccagcccatggatatcctgcagattattaattgtttgaccactatttatgaccgcctggagcaagagcacaacaatttggtcaacgtccctctctgcgtggatatgtgtctgaactggctgctgaatgtttatgatacgggacgaacagggaggatccgtgtcctgtcttttaaaactggcatcatttccctgtgtaaagcacatttggaagacaagtacagataccttttcaagcaagtggcaagttcaacaggattttgtgaccagcgcaggctgggcctccttctgcatgattctatccaaattccaagacagttgggtgaagttgcatcctttgggggcagtaacattgagccaagtgtccggagctgcttccaatttgctaataataagccagagatcgaagcggccctcttcctagactggatgagactggaaccccagtccatggtgtggctgcccgtcctgcacagagtggctgctgcagaaactgccaagcatcaggccaaatgtaacatctgcaaagagtgtccaatcattggattcaggtacaggagtctaaagcactttaattatgacatctgccaaagctgctttttttctggtcgagttgcaaaaggccataaaatgcactatcccatggtggaatattgcactccgactacatcaggagaagatgttcgagactttgccaaggtactaaaaaacaaatttcgaaccaaaaggtattttgcgaagcatccccgaatgggctacctgccagtgcagactgtcttagagggggacaacatggaaactcccgttactctgatcaacttctggccagtagattctgcgcctgcctcgtcccctcagctttcacacgatgatactcattcacgcattgaacattatgctagcaggctagcagaaatggaaaacagcaatggatcttatctaaatgatagcatctctcctaatgagagcatagatgatgaacatttgttaatccagcattactgccaaagtttgaaccaggactcccccctgagccagcctcgtagtcctgcccagatcttgatttccttagagagtgaggaaagaggggagctagagagaatcctagcagatcttgaggaagaaaacaggaatctgcaagcagaatatgaccgtctaaagcagcagcacgaacataaaggcctgtccccactgccgtcccctcctgaaatgatgcccacctctccccagagtccccgggatgctgagctcattgctgaggccaagctactgcgtcaacacaaaggccgcctggaagccaggatgcaaatcctggaagaccacaataaacagctggagtcacagttacacaggctaaggcagctgctggagcaaccccaggcagaggccaaagtgaatggcacaacggtgtcctctccttctacctctctacagaggtccgacagcagtcagcctatgctgctccgagtggttggcagtcaaacttcggactccatgggtgaggaagatcttctcagtcctccccaggacacaagcacagggttagaggaggtgatggagcaactcaacaactccttccctagttcaagaggaagaaatacccctggaaagccaatgagagaggacacaatg

SEQ ID NO: 120 - protein, 1260 aa, synthetic construct
MLWWEEVEDCYEREDVQKKTFTKWVNAQFSKFGKQHIENLFSDLQDGRRLLDLLEGLTGQKLPKEKGSTRVHALNNVNKALRVLQNNNVDLVNIGSTDIVDGNHKLTLGLIWNIILHWQVKNVMKNIMAGLQQTNSEKILLSWVRQSTRNYPQVNVINFTTSWSDGLALNALIHSHRPDLFDWNSVVCQQSATQRLEHAFNIARYQLGIEKLLDPEDVDTTYPDKKSILMYITSLFQVLPQQVSIEAIQEVEMLPRPPKVTKEEHFQLHHQMHYSQQITVSLAQGYERTSSPKPRFKSYAYTQAAYVTTSDPTRSPFPSQHLEAPEDKSFGSSLMESEVNLDRYQTALEEVLSWLLSAEDTLQAQGEISNDVEVVKDQFHTHEGYMMDLTAHQGRVGNILQLGSKLIGTGKLSEDEETEVQEQMNLLNSRWECLRVASMEKQSNLHRVLMDRSVEKWRRFHYDIKIFNQWLTEAEQFLRKTQIPENWEHAKYKWYLKELQDGIGQRQTVVRTLNATGEEIIQQSSKTDASILQEKLGSLNLRWQEVCKQLSDRKKRLEEQKNILSEFQRDLNEFVLWLEEADNIASIPLEPGKEQQLKEKLEQVKLLVEELPLRQGILKQLNETGGPVLVSAPISPEEQDKLENKLKQTNLQWIKVSRALPEKQGEIEAQIKDLGQLEKKLEDLEEQLNHLLLWLSPIRNQLEIYNQPNQEGPFDVKETEIAVQAKQPDVEEILSKGQHLYKEKPATQPVKRKLEDLSSEWKAVNRLLQELRAKQWQRKIDETLERLQELQEATDELDLKLRQAEVIKGSWQPVGDLLIDSLQDHLEKVKALRGEIAPLKENVSHVNDLARQLTTLGIQLSPYNLSTLEDLNTRWKLLQVAVEDRVRQLHEAHRDFGPASQHFLSTSVQGPWERAISPNKVPYYINHETQTTCWDHPKMTELYQSLADLNNVRFSAYRTAMKLRRLQKALCLDLLSLSAACDALDQHNLKQNDQPMDILQIINCLTTIYDRLEQEHNNLVNVPLCVDMCLNWLLNVYDTGRTGRIRVLSFKTGIISLCKAHLEDKYRYLFKQVASSTGFCDQRRLGLLLHDSIQIPRQLGEVASFGGSNIEPSVRSCFQFANNKPEIEAALFLDWMRLEPQSMVWLPVLHRVAAAETAKHQAKCNICKECPIIGFRYRSLKHFNYDICQSCFFSGRVAKGHKMHYPMVEYCTPTTSGEDVRDFAKVLKNKFRTKRYFAKHPRMGYLPVQTVLEGDNMETP

SEQ ID NO: 121 - protein, 1283 aa, synthetic construct
MLWWEEVEDCYEREDVQKKTFTKWVNAQFSKFGKQHIENLFSDLQDGRRLLDLLEGLTGQKLPKEKGSTRVHALNNVNKALRVLQNNNVDLVNIGSTDIVDGNHKLTLGLIWNIILHWQVKNVMKNIMAGLQQTNSEKILLSWVRQSTRNYPQVNVINFTTSWSDGLALNALIHSHRPDLFDWNSVVCQQSATQRLEHAFNIARYQLGIEKLLDPEDVDTTYPDKKSILMYITSLFQVLPQQVSIEAIQEVEMLPRPPKVTKEEHFQLHHQMHYSQQITVSLAQGYERTSSPKPRFKSYAYTQAAYVTTSDPTRSPFPSQHLEAPEDKSFGSSLMESEVNLDRYQTALEEVLSWLLSAEDTLQAQGEISNDVEVVKDQFHTHEGYMMDLTAHQGRVGNILQLGSKLIGTGKLSEDEETEVQEQMNLLNSRWECLRVASMEKQSNLHRVLMDRSVEKWRRFHYDIKIFNQWLTEAEQFLRKTQIPENWEHAKYKWYLKELQDGIGQRQTVVRTLNATGEEIIQQSSKTDASILQEKLGSLNLRWQEVCKQLSDRKKRLEEQKNILSEFQRDLNEFVLWLEEADNIASIPLEPGKEQQLKEKLEQVKLLVEELPLRQGILKQLNETGGPVLVSAPISPEEQDKLENKLKQTNLQWIKVSRALPEKQGEIEAQIKDLGQLEKKLEDLEEQLNHLLLWLSPIRNQLEIYNQPNQEGPFDVKETEIAVQAKQPDVEEILSKGQHLYKEKPATQPVKRKLEDLSSEWKAVNRLLQELRAKQGPASQHFLSTSVQGPWERAISPNKVPYYINHETQTTCWDHPKMTELYQSLADLNNVRFSAYRTAMKLRRLQKALCLDLLSLSAACDALDQHNLKQNDQPMDILQIINCLTTIYDRLEQEHNNLVNVPLCVDMCLNWLLNVYDTGRTGRIRVLSFKTGIISLCKAHLEDKYRYLFKQVASSTGFCDQRRLGLLLHDSIQIPRQLGEVASFGGSNIEPSVRSCFQFANNKPEIEAALFLDWMRLEPQSMVWLPVLHRVAAAETAKHQAKCNICKECPIIGFRYRSLKHFNYDICQSCFFSGRVAKGHKMHYPMVEYCTPTTSGEDVRDFAKVLKNKFRTKRYFAKHPRMGYLPVQTVLEGDNMETPVTLINFWPVDSAPASSPQLSHDDTHSRIEHYASRLAEMENSNGSYLNDSISPNESIDDEHLLIQHYCQSLNQDSPLSQPRSPAQILISLESEERGELERILADLEEENRNLQAEYDRLKQQHEHKGLSPLPSPPEMMPTSPQSP

SEQ ID NO: 122 - protein, 1220 aa, synthetic construct
MLWWEEVEDCYEREDVQKKTFTKWVNAQFSKFGKQHIENLFSDLQDGRRLLDLLEGLTGQKLPKEKGSTRVHALNNVNKALRVLQNNNVDLVNIGSTDIVDGNHKLTLGLIWNIILHWQVKNVMKNIMAGLQQTNSEKILLSWVRQSTRNYPQVNVINFTTSWSDGLALNALIHSHRPDLFDWNSVVCQQSATQRLEHAFNIARYQLGIEKLLDPEDVDTTYPDKKSILMYITSLFQVLPQQVSIEAIQEVEMLPRPPKVTKEEHFQLHHQMHYSQQITVSLAQGYERTSSPKPRFKSYAYTQAAYVTTSDPTRSPFPSQHLEAPEDKSFGSSLMESEVNLDRYQTALEEVLSWLLSAEDTLQAQGEISNDVEVVKDQFHTHEGYMMDLTAHQGRVGNILQLGSKLIGTGKLSEDEETEVQEQMNLLNSRWECLRVASMEKQSNLHRVLMDRSVEKWRRFHYDIKIFNQWLTEAEQFLRKTQIPENWEHAKYKWYLKELQDGIGQRQTVVRTLNATGEEIIQQSSKTDASILQEKLGSLNLRWQEVCKQLSDRKKRLEEQKNILSEFQRDLNEFVLWLEEADNIASIPLEPGKEQQLKEKLEQVKLLVEELPLRQGILKQLNETGGPVLVSAPISPEEQDKLENKLKQTNLQWIKVSRALPEKQGEIEAQIKDLGQLEKKLEDLEEQLNHLLLWLSPIRNQLEIYNQPNQEGPFDVKETEIAVQAKQPDVEEILSKGQHLYKEKPATQPVKRKLEDLSSEWKAVNRLLQELRAKQGPASQHFLSTSVQGPWERAISPNKVPYYINHETQTTCWDHPKMTELYQSLADLNNVRFSAYRTAMKLRRLQKALCLDLLSLSAACDALDQHNLKQNDQPMDILQIINCLTTIYDRLEQEHNNLVNVPLCVDMCLNWLLNVYDTGRTGRIRVLSFKTGIISLCKAHLEDKYRYLFKQVASSTGFCDQRRLGLLLHDSIQIPRQLGEVASFGGSNIEPSVRSCFQFANNKPEIEAALFLDWMRLEPQSMVWLPVLHRVAAAETAKHQAKCNICKECPIIGFRYRSLKHFNYDICQSCFFSGRVAKGHKMHYPMVEYCTPTTSGEDVRDFAKVLKNKFRTKRYFAKHPRMGYLPVQTVLEGDNMETPVTLINFWPVDSAPASSPQLSHDDTHSRIEHYASRLAEMENSNGSYLNDSISPNESIDDEHLLIQHYCQSLNQDSPLSQPRS

SEQ ID NO: 123 - protein, 1404 aa, synthetic construct
MLWWEEVEDCYEREDVQKKTFTKWVNAQFSKFGKQHIENLFSDLQDGRRLLDLLEGLTGQKLPKEKGSTRVHALNNVNKALRVLQNNNVDLVNIGSTDIVDGNHKLTLGLIWNIILHWQVKNVMKNIMAGLQQTNSEKILLSWVRQSTRNYPQVNVINFTTSWSDGLALNALIHSHRPDLFDWNSVVCQQSATQRLEHAFNIARYQLGIEKLLDPEDVDTTYPDKKSILMYITSLFQVLPQQVSIEAIQEVEMLPRPPKVTKEEHFQLHHQMHYSQQITVSLAQGYERTSSPKPRFKSYAYTQAAYVTTSDPTRSPFPSQHLEAPEDKSFGSSLMESEVNLDRYQTALEEVLSWLLSAEDTLQAQGEISNDVEVVKDQFHTHEGYMMDLTAHQGRVGNILQLGSKLIGTGKLSEDEETEVQEQMNLLNSRWECLRVASMEKQSNLHRVLMDRSVEKWRRFHYDIKIFNQWLTEAEQFLRKTQIPENWEHAKYKWYLKELQDGIGQRQTVVRTLNATGEEIIQQSSKTDASILQEKLGSLNLRWQEVCKQLSDRKKRLEEQKNILSEFQRDLNEFVLWLEEADNIASIPLEPGKEQQLKEKLEQVKLLVEELPLRQGILKQLNETGGPVLVSAPISPEEQDKLENKLKQTNLQWIKVSRALPEKQGEIEAQIKDLGQLEKKLEDLEEQLNHLLLWLSPIRNQLEIYNQPNQEGPFDVKETEIAVQAKQPDVEEILSKGQHLYKEKPATQPVKRKLEDLSSEWKAVNRLLQELRAKQWQRKIDETLERLQELQEATDELDLKLRQAEVIKGSWQPVGDLLIDSLQDHLEKVKALRGEIAPLKENVSHVNDLARQLTTLGIQLSPYNLSTLEDLNTRWKLLQVAVEDRVRQLHEAHRDFGPASQHFLSTSVQGPWERAISPNKVPYYINHETQTTCWDHPKMTELYQSLADLNNVRFSAYRTAMKLRRLQKALCLDLLSLSAACDALDQHNLKQNDQPMDILQIINCLTTIYDRLEQEHNNLVNVPLCVDMCLNWLLNVYDTGRTGRIRVLSFKTGIISLCKAHLEDKYRYLFKQVASSTGFCDQRRLGLLLHDSIQIPRQLGEVASFGGSNIEPSVRSCFQFANNKPEIEAALFLDWMRLEPQSMVWLPVLHRVAAAETAKHQAKCNICKECPIIGFRYRSLKHFNYDICQSCFFSGRVAKGHKMHYPMVEYCTPTTSGEDVRDFAKVLKNKFRTKRYFAKHPRMGYLPVQTVLEGDNMETPVTLINFWPVDSAPASSPQLSHDDTHSRIEHYASRLAEMENSNGSYLNDSISPNESIDDEHLLIQHYCQSLNQDSPLSQPRSPAQILISLESEERGELERILADLEEENRNLQAEYDRLKQQHEHKGLSPLPSPPEMMPTSPQSP

SEQ ID NO: 124 - protein, 1415 aa, synthetic construct
MLWWEEVEDCYEREDVQKKTFTKWVNAQFSKFGKQHIENLFSDLQDGRRLLDLLEGLTGQKLPKEKGSTRVHALNNVNKALRVLQNNNVDLVNIGSTDIVDGNHKLTLGLIWNIILHWQVKNVMKNIMAGLQQTNSEKILLSWVRQSTRNYPQVNVINFTTSWSDGLALNALIHSHRPDLFDWNSVVCQQSATQRLEHAFNIARYQLGIEKLLDPEDVDTTYPDKKSILMYITSLFQVLPQQVSIEAIQEVEMLPRPPKVTKEEHFQLHHQMHYSQQITVSLAQGYERTSSPKPRFKSYAYTQAAYVTTSDPTRSPFPSQHLEAPEDKSFGSSLMESEVNLDRYQTALEEVLSWLLSAEDTLQAQGEISNDVEVVKDQFHTHEGYMMDLTAHQGRVGNILQLGSKLIGTGKLSEDEETEVQEQMNLLNSRWECLRVASMEKQSNLHRVLMDRSVEKWRRFHYDIKIFNQWLTEAEQFLRKTQIPENWEHAKYKWYLKELQDGIGQRQTVVRTLNATGEEIIQQSSKTDASILQEKLGSLNLRWQEVCKQLSDRKKRLEEQKNILSEFQRDLNEFVLWLEEADNIASIPLEPGKEQQLKEKLEQVKLLVEELPLRQGILKQLNETGGPVLVSAPISPEEQDKLENKLKQTNLQWIKVSRALPEKQGEIEAQIKDLGQLEKKLEDLEEQLNHLLLWLSPIRNQLEIYNQPNQEGPFDVKETEIAVQAKQPDVEEILSKGQHLYKEKPATQPVKRKLEDLSSEWKAVNRLLQELRAKQGPASQHFLSTSVQGPWERAISPNKVPYYINHETQTTCWDHPKMTELYQSLADLNNVRFSAYRTAMKLRRLQKALCLDLLSLSAACDALDQHNLKQNDQPMDILQIINCLTTIYDRLEQEHNNLVNVPLCVDMCLNWLLNVYDTGRTGRIRVLSFKTGIISLCKAHLEDKYRYLFKQVASSTGFCDQRRLGLLLHDSIQIPRQLGEVASFGGSNIEPSVRSCFQFANNKPEIEAALFLDWMRLEPQSMVWLPVLHRVAAAETAKHQAKCNICKECPIIGFRYRSLKHFNYDICQSCFFSGRVAKGHKMHYPMVEYCTPTTSGEDVRDFAKVLKNKFRTKRYFAKHPRMGYLPVQTVLEGDNMETPVTLINFWPVDSAPASSPQLSHDDTHSRIEHYASRLAEMENSNGSYLNDSISPNESIDDEHLLIQHYCQSLNQDSPLSQPRSPAQILISLESEERGELERILADLEEENRNLQAEYDRLKQQHEHKGLSPLPSPPEMMPTSPQSPRDAELIAEAKLLRQHKGRLEARMQILEDHNKQLESQLHRLRQLLEQPQAEAKVNGTTVSSPSTSLQRSDSSQPMLLRVVGSQTSDSMGEEDLLSPPQDTSTGLEEVMEQLNNSFPSSRGRNTPGKPMREDTM

SEQ ID NO: 125 - protein, 1536 aa, synthetic construct
MLWWEEVEDCYEREDVQKKTFTKWVNAQFSKFGKQHIENLFSDLQDGRRLLDLLEGLTGQKLPKEKGSTRVHALNNVNKALRVLQNNNVDLVNIGSTDIVDGNHKLTLGLIWNIILHWQVKNVMKNIMAGLQQTNSEKILLSWVRQSTRNYPQVNVINFTTSWSDGLALNALIHSHRPDLFDWNSVVCQQSATQRLEHAFNIARYQLGIEKLLDPEDVDTTYPDKKSILMYITSLFQVLPQQVSIEAIQEVEMLPRPPKVTKEEHFQLHHQMHYSQQITVSLAQGYERTSSPKPRFKSYAYTQAAYVTTSDPTRSPFPSQHLEAPEDKSFGSSLMESEVNLDRYQTALEEVLSWLLSAEDTLQAQGEISNDVEVVKDQFHTHEGYMMDLTAHQGRVGNILQLGSKLIGTGKLSEDEETEVQEQMNLLNSRWECLRVASMEKQSNLHRVLMDRSVEKWRRFHYDIKIFNQWLTEAEQFLRKTQIPENWEHAKYKWYLKELQDGIGQRQTVVRTLNATGEEIIQQSSKTDASILQEKLGSLNLRWQEVCKQLSDRKKRLEEQKNILSEFQRDLNEFVLWLEEADNIASIPLEPGKEQQLKEKLEQVKLLVEELPLRQGILKQLNETGGPVLVSAPISPEEQDKLENKLKQTNLQWIKVSRALPEKQGEIEAQIKDLGQLEKKLEDLEEQLNHLLLWLSPIRNQLEIYNQPNQEGPFDVKETEIAVQAKQPDVEEILSKGQHLYKEKPATQPVKRKLEDLSSEWKAVNRLLQELRAKQWQRKIDETLERLQELQEATDELDLKLRQAEVIKGSWQPVGDLLIDSLQDHLEKVKALRGEIAPLKENVSHVNDLARQLTTLGIQLSPYNLSTLEDLNTRWKLLQVAVEDRVRQLHEAHRDFGPASQHFLSTSVQGPWERAISPNKVPYYINHETQTTCWDHPKMTELYQSLADLNNVRFSAYRTAMKLRRLQKALCLDLLSLSAACDALDQHNLKQNDQPMDILQIINCLTTIYDRLEQEHNNLVNVPLCVDMCLNWLLNVYDTGRTGRIRVLSFKTGIISLCKAHLEDKYRYLFKQVASSTGFCDQRRLGLLLHDSIQIPRQLGEVASFGGSNIEPSVRSCFQFANNKPEIEAALFLDWMRLEPQSMVWLPVLHRVAAAETAKHQAKCNICKECPIIGFRYRSLKHFNYDICQSCFFSGRVAKGHKMHYPMVEYCTPTTSGEDVRDFAKVLKNKFRTKRYFAKHPRMGYLPVQTVLEGDNMETPVTLINFWPVDSAPASSPQLSHDDTHSRIEHYASRLAEMENSNGSYLNDSISPNESIDDEHLLIQHYCQSLNQDSPLSQPRSPAQILISLESEERGELERILADLEEENRNLQAEYDRLKQQHEHKGLSPLPSPPEMMPTSPQSPRDAELIAEAKLLRQHKGRLEARMQILEDHNKQLESQLHRLRQLLEQPQAEAKVNGTTVSSPSTSLQRSDSSQPMLLRVVGSQTSDSMGEEDLLSPPQDTSTGLEEVMEQLNNSFPSSRGRNTPGKPMREDTM

SEQ ID NO: 126 - DNA, 3780 bp, synthetic construct
  source 1..3780: mol_type = other DNA
atgctttggtgggaagaagtagaggactgttatgaaagagaagatgttcaaaagaaaacattcacaaaatgggtaaatgcacaattttctaagtttgggaagcagcatattgagaacctcttcagtgacctacaggatgggaggcgcctcctagacctcctcgaaggcctgacagggcaaaaactgccaaaagaaaaaggatccacaagagttcatgccctgaacaatgtcaacaaggcactgcgggttttgcagaacaataatgttgatttagtgaatattggaagtactgacatcgtagatggaaatcataaactgactcttggtttgatttggaatataatcctccactggcaggtcaaaaatgtaatgaaaaatatcatggctggattgcaacaaaccaacagtgaaaagattctcctgagctgggtccgacaatcaactcgtaattatccacaggttaatgtaatcaacttcaccaccagctggtctgatggcctggctttgaatgctctcatccatagtcataggccagacctatttgactggaatagtgtggtttgccagcagtcagccacacaacgactggaacatgcattcaacatcgccagatatcaattaggcatagagaaactactcgatcctgaagatgttgataccacctatccagataagaagtccatcttaatgtacatcacatcactcttccaagttttgcctcaacaagtgagcattgaagccatccaggaagtggaaatgttgccaaggccacctaaagtgactaaagaagaacattttcagttacatcatcaaatgcactattctcaacagatcacggtcagtctagcacagggatatgagagaacttcttcccctaagcctcgattcaagagctatgcctacacacaggctgcttatgtcaccacctctgaccctacacggagcccatttccttcacagcatttggaagctcctgaagacaagtcatttggcagttcattgatggagagtgaagtaaacctggaccgttatcaaacagctttagaagaagtattatcgtggcttctttctgctgaggacacattgcaagcacaaggagagatttctaatgatgtggaagtggtgaaagaccagtttcatactcatgaggggtacatgatggatttgacagcccatcagggccgggttggtaatattctacaattgggaagtaagctgattggaacaggaaaattatcagaagatgaagaaactgaagtacaagagcagatgaatctcctaaattcaagatgggaatgcctcagggtagctagcatggaaaaacaaagcaatttacatagagttttaatggatagatctgttgagaaatggcggcgttttcattatgatataaagatatttaatcagtggctaacagaagctgaacagtttctcagaaagacacaaattcctgagaattgggaacatgctaaatacaaatggtatcttaaggaactccaggatggcattgggcagcggcaaactgttgtcagaacattgaatgcaactggggaagaaataattcagcaatcctcaaaaacagatgccagtattctacaggaaaaattgggaagcctgaatctgcggtggcaggaggtctgcaaacagctgtcagacagaaaaaagaggctagaagaacaaaagaatatcttgtcagaatttcaaagagatttaaatgaatttgttttatggttggaggaagcagataacattgctagtatcccacttgaacctggaaaagagcagcaactaaaagaaaagcttgagcaagtcaagttactggtggaagagttgcccctgcgccagggaattctcaaacaattaaatgaaactggaggacccgtgcttgtaagtgctcccataagcccagaagagcaagataaacttgaaaataagctcaagcagacaaatctccagtggataaaggtttccagagctttacctgagaaacaaggagaaattgaagctcaaataaaagaccttgggcagcttgaaaaaaagcttgaagaccttgaagagcagttaaatcatctgctgctgtggttatctcctattaggaatcagttggaaatttataaccaaccaaaccaagaaggaccatttgacgttaaggaaactgaaatagcagttcaagctaaacaaccggatgtggaagagattttgtctaaagggcagcatttgtacaaggaaaaaccagccactcagccagtgaagaggaagttagaagatctgagctctgagtggaaggcggtaaaccgtttacttcaagagctgagggcaaagcagtggcagagaaaaatagatgagacccttgaaagactccgggaacttcaagaggccacggatgagctggacctcaagctgcgccaagctgaggtgatcaagggatcctggcagcccgtgggcgatctcctcattgactctctccaagatcacctcgagaaagtcaaggcacttcgaggagaaattgcgcctctgaaagagaacgtgagccacgtcaatgaccttgctcgccagcttaccactttgggcattcagctctcaccgtataacctcagcactctggaagacctgaacaccagatggaagcttctgcaggtggccgtcgaggaccgagtcaggcagctgcatgaagcccacagggactttggtccagcatctcagcactttctttccacgtctgtccagggtccctgggagagagccatctcgccaaacaaagtgccctactatatcaaccacgagactcaaacaacttgctgggaccatcccaaaatgacagagctctaccagtctttagctgacctgaataatgtcagattctcagcttataggactgccatgaaactccgaagactgcagaaggccctttgcttggatctcttgagcctgtcagctgcatgtgatgccttggaccagcacaacctcaagcaaaatgaccagcccatggatatcctgcagattattaattgtttgaccactatttatgaccgcctggagcaagagcacaacaatttggtcaacgtccctctctgcgtggatatgtgtctgaactggctgctgaatgtttatgatacgggacgaacagggaggatccgtgtcctgtcttttaaaactggcatcatttccctgtgtaaagcacatttggaagacaagtacagataccttttcaagcaagtggcaagttcaacaggattttgtgaccagcgcaggctgggcctccttctgcatgattctatccaaattccaagacagttgggtgaagttgcatcctttgggggcagtaacattgagccaagtgtccggagctgcttccaatttgctaataataagccagagatcgaagcggccctcttcctagactggatgagactggaaccccagtccatggtgtggctgcccgtcctgcacagagtggctgctgcagaaactgccaagcatcaggccaaatgtaacatctgcaaagagtgtccaatcattggattcaggtacaggagtctaaagcactttaattatgacatctgccaaagctgctttttttctggtcgagttgcaaaaggccataaaatgcactatcccatggtggaatattgcactccgactacatcaggagaagatgttcgagactttgccaaggtactaaaaaacaaatttcgaaccaaaaggtattttgcgaagcatccccgaatgggctacctgccagtgcagactgtcttagagggggacaacatggaaactccc

SEQ ID NO: 127 - DNA, 3849 bp, synthetic construct
  source 1..3849: mol_type = other DNA
atgctttggtgggaagaagtagaggactgttatgaaagagaagatgttcaaaagaaaacattcacaaaatgggtaaatgcacaattttctaagtttgggaagcagcatattgagaacctcttcagtgacctacaggatgggaggcgcctcctagacctcctcgaaggcctgacagggcaaaaactgccaaaagaaaaaggatccacaagagttcatgccctgaacaatgtcaacaaggcactgcgggttttgcagaacaataatgttgatttagtgaatattggaagtactgacatcgtagatggaaatcataaactgactcttggtttgatttggaatataatcctccactggcaggtcaaaaatgtaatgaaaaatatcatggctggattgcaacaaaccaacagtgaaaagattctcctgagctgggtccgacaatcaactcgtaattatccacaggttaatgtaatcaacttcaccaccagctggtctgatggcctggctttgaatgctctcatccatagtcataggccagacctatttgactggaatagtgtggtttgccagcagtcagccacacaacgactggaacatgcattcaacatcgccagatatcaattaggcatagagaaactactcgatcctgaagatgttgataccacctatccagataagaagtccatcttaatgtacatcacatcactcttccaagttttgcctcaacaagtgagcattgaagccatccaggaagtggaaatgttgccaaggccacctaaagtgactaaagaagaacattttcagttacatcatcaaatgcactattctcaacagatcacggtcagtctagcacagggatatgagagaacttcttcccctaagcctcgattcaagagctatgcctacacacaggctgcttatgtcaccacctctgaccctacacggagcccatttccttcacagcatttggaagctcctgaagacaagtcatttggcagttcattgatggagagtgaagtaaacctggaccgttatcaaacagctttagaagaagtattatcgtggcttctttctgctgaggacacattgcaagcacaaggagagatttctaatgatgtggaagtggtgaaagaccagtttcatactcatgaggggtacatgatggatttgacagcccatcagggccgggttggtaatattctacaattgggaagtaagctgattggaacaggaaaattatcagaagatgaagaaactgaagtacaagagcagatgaatctcctaaattcaagatgggaatgcctcagggtagctagcatggaaaaacaaagcaatttacatagagttttaatggatagatctgttgagaaatggcggcgttttcattatgatataaagatatttaatcagtggctaacagaagctgaacagtttctcagaaagacacaaattcctgagaattgggaacatgctaaatacaaatggtatcttaaggaactccaggatggcattgggcagcggcaaactgttgtcagaacattgaatgcaactggggaagaaataattcagcaatcctcaaaaacagatgccagtattctacaggaaaaattgggaagcctgaatctgcggtggcaggaggtctgcaaacagctgtcagacagaaaaaagaggctagaagaacaaaagaatatcttgtcagaatttcaaagagatttaaatgaatttgttttatggttggaggaagcagataacattgctagtatcccacttgaacctggaaaagagcagcaactaaaagaaaagcttgagcaagtcaagttactggtggaagagttgcccctgcgccagggaattctcaaacaattaaatgaaactggaggacccgtgcttgtaagtgctcccataagcccagaagagcaagataaacttgaaaataagctcaagcagacaaatctccagtggataaaggtttccagagctttacctgagaaacaaggagaaattgaagctcaaataaaagaccttgggcagcttgaaaaaaagcttgaagaccttgaagagcagttaaatcatctgctgctgtggttatctcctattaggaatcagttggaaatttataaccaaccaaaccaagaaggaccatttgacgttaaggaaactgaaatagcagttcaagctaaacaaccggatgtggaagagattttgtctaaagggcagcatttgtacaaggaaaaaccagccactcagccagtgaagaggaagttagaagatctgagctctgagtggaaggcggtaaaccgtttacttcaagagctgagggcaaagcagggtccagcatctcagcactttctttccacgtctgtccagggtccctgggagagagccatctcgccaaacaaagtgccctactatatcaaccacgagactcaaacaacttgctgggaccatcccaaaatgacagagctctaccagtctttagctgacctgaataatgtcagattctcagcttataggactgccatgaaactccgaagactgcagaaggccctttgcttggatctcttgagcctgtcagctgcatgtgatgccttggaccagcacaacctcaagcaaaatgaccagcccatggatatcctgcagattattaattgtttgaccactatttatgaccgcctggagcaagagcacaacaatttggtcaacgtccctctctgcgtggatatgtgtctgaactggctgctgaatgtttatgatacgggacgaacagggaggatccgtgtcctgtcttttaaaactggcatcatttccctgtgtaaagcacatttggaagacaagtacagataccttttcaagcaagtggcaagttcaacaggattttgtgaccagcgcaggctgggcctccttctgcatgattctatccaaattccaagacagttgggtgaagttgcatcctttgggggcagtaacattgagccaagtgtccggagctgcttccaatttgctaataataagccagagatcgaagcggccctcttcctagactggatgagactggaaccccagtccatggtgtggctgcccgtcctgcacagagtggctgctgcagaaactgccaagcatcaggccaaatgtaacatctgcaaagagtgtccaatcattggattcaggtacaggagtctaaagcactttaattatgacatctgccaaagctgctttttttctggtcgagttgcaaaaggccataaaatgcactatcccatggtggaatattgcactccgactacatcaggagaagatgttcgagactttgccaaggtactaaaaaacaaatttcgaaccaaaaggtattttgcgaagcatccccgaatgggctacctgccagtgcagactgtcttagagggggacaacatggaaactcccgttactctgatcaacttctggccagtagattctgcgcctgcctcgtcccctcagctttcacacgatgatactcattcacgcattgaacattatgctagcaggctagcagaaatggaaaacagcaatggatcttatctaaatgatagcatctctcctaatgagagcatagatgatgaacatttgttaatccagcattactgccaaagtttgaaccaggactcccccctgagccagcctcgtagtcctgcccagatcttgatttccttagagagtgaggaaagaggggagctagagagaatcctagcagatcttgaggaagaaaacaggaatctgcaagcagaatatgaccgtctaaagcagcagcacgaacataaaggcctgtccccactgccgtcccctcctgaaatgatgcccacctctccccagagtccc

SEQ ID NO: 128 - DNA, 3660 bp, synthetic construct
  source 1..3660: mol_type = other DNA
atgctttggtgggaagaagtagaggactgttatgaaagagaagatgttcaaaagaaaacattcacaaaatgggtaaatgcacaattttctaagtttgggaagcagcatattgagaacctcttcagtgacctacaggatgggaggcgcctcctagacctcctcgaaggcctgacagggcaaaaactgccaaaagaaaaaggatccacaagagttcatgccctgaacaatgtcaacaaggcactgcgggttttgcagaacaataatgttgatttagtgaatattggaagtactgacatcgtagatggaaatcataaactgactcttggtttgatttggaatataatcctccactggcaggtcaaaaatgtaatgaaaaatatcatggctggattgcaacaaaccaacagtgaaaagattctcctgagctgggtccgacaatcaactcgtaattatccacaggttaatgtaatcaacttcaccaccagctggtctgatggcctggctttgaatgctctcatccatagtcataggccagacctatttgactggaatagtgtggtttgccagcagtcagccacacaacgactggaacatgcattcaacatcgccagatatcaattaggcatagagaaactactcgatcctgaagatgttgataccacctatccagataagaagtccatcttaatgtacatcacatcactcttccaagttttgcctcaacaagtgagcattgaagccatccaggaagtggaaatgttgccaaggccacctaaagtgactaaagaagaacattttcagttacatcatcaaatgcactattctcaacagatcacggtcagtctagcacagggatatgagagaacttcttcccctaagcctcgattcaagagctatgcctacacacaggctgcttatgtcaccacctctgaccctacacggagcccatttccttcacagcatttggaagctcctgaagacaagtcatttggcagttcattgatggagagtgaagtaaacctggaccgttatcaaacagctttagaagaagtattatcgtggcttctttctgctgaggacacattgcaagcacaaggagagatttctaatgatgtggaagtggtgaaagaccagtttcatactcatgaggggtacatgatggatttgacagcccatcagggccgggttggtaatattctacaattgggaagtaagctgattggaacaggaaaattatcagaagatgaagaaactgaagtacaagagcagatgaatctcctaaattcaagatgggaatgcctcagggtagctagcatggaaaaacaaagcaatttacatagagttttaatggatagatctgttgagaaatggcggcgttttcattatgatataaagatatttaatcagtggctaacagaagctgaacagtttctcagaaagacacaaattcctgagaattgggaacatgctaaatacaaatggtatcttaaggaactccaggatggcattgggcagcggcaaactgttgtcagaacattgaatgcaactggggaagaaataattcagcaatcctcaaaaacagatgccagtattctacaggaaaaattgggaagcctgaatctgcggtggcaggaggtctgcaaacagctgtcagacagaaaaaagaggctagaagaacaaaagaatatcttgtcagaatttcaaagagatttaaatgaatttgttttatggttggaggaagcagataacattgctagtatcccacttgaacctggaaaagagcagcaactaaaagaaaagcttgagcaagtcaagttactggtggaagagttgcccctgcgccagggaattctcaaacaattaaatgaaactggaggacccgtgcttgtaagtgctcccataagcccagaagagcaagataaacttgaaaataagctcaagcagacaaatctccagtggataaaggtttccagagctttacctgagaaacaaggagaaattgaagctcaaataaaagaccttgggcagcttgaaaaaaagcttgaagaccttgaagagcagttaaatcatctgctgctgtggttatctcctattaggaatcagttggaaatttataaccaaccaaaccaagaaggaccatttgacgttaaggaaactgaaatagcagttcaagctaaacaaccggatgtggaagagattttgtctaaagggcagcatttgtacaaggaaaaaccagccactcagccagtgaagaggaagttagaagatctgagctctgagtggaaggcggtaaaccgtttacttcaagagctgagggcaaagcagggtccagcatctcagcactttctttccacgtctgtccagggtccctgggagagagccatctcgccaaacaaagtgccctactatatcaaccacgagactcaaacaacttgctgggaccatcccaaaatgacagagctctaccagtctttagctgacctgaataatgtcagattctcagcttataggactgccatgaaactccgaagactgcagaaggccctttgcttggatctcttgagcctgtcagctgcatgtgatgccttggaccagcacaacctcaagcaaaatgaccagcccatggatatcctgcagattattaattgtttgaccactatttatgaccgcctggagcaagagcacaacaatttggtcaacgtccctctctgcgtggatatgtgtctgaactggctgctgaatgtttatgatacgggacgaacagggaggatccgtgtcctgtcttttaaaactggcatcatttccctgtgtaaagcacatttggaagacaagtacagataccttttcaagcaagtggcaagttcaacaggattttgtgaccagcgcaggctgggcctccttctgcatgattctatccaaattccaagacagttgggtgaagttgcatcctttgggggcagtaacattgagccaagtgtccggagctgcttccaatttgctaataataagccagagatcgaagcggccctcttcctagactggatgagactggaaccccagtccatggtgtggctgcccgtcctgcacagagtggctgctgcagaaactgccaagcatcaggccaaatgtaacatctgcaaagagtgtccaatcattggattcaggtacaggagtctaaagcactttaattatgacatctgccaaagctgctttttttctggtcgagttgcaaaaggccataaaatgcactatcccatggtggaatattgcactccgactacatcaggagaagatgttcgagactttgccaaggtactaaaaaacaaatttcgaaccaaaaggtattttgcgaagcatccccgaatgggctacctgccagtgcagactgtcttagagggggacaacatggaaactcccgttactctgatcaacttctggccagtagattctgcgcctgcctcgtcccctcagctttcacacgatgatactcattcacgcattgaacattatgctagcaggctagcagaaatggaaaacagcaatggatcttatctaaatgatagcatctctcctaatgagagcatagatgatgaacatttgttaatccagcattactgccaaagtttgaaccaggactcccccctgagccagcctcgtagt

SEQ ID NO: 129 - DNA, 4212 bp, synthetic construct
  source 1..4212: mol_type = other DNA
atgctttggtgggaagaagtagaggactgttatgaaagagaagatgttcaaaagaaaacattcacaaaatgggtaaatgcacaattttctaagtttgggaagcagcatattgagaacctcttcagtgacctacaggatgggaggcgcctcctagacctcctcgaaggcctgacagggcaaaaactgccaaaagaaaaaggatccacaagagttcatgccctgaacaatgtcaacaaggcactgcgggttttgcagaacaataatgttgatttagtgaatattggaagtactgacatcgtagatggaaatcataaactgactcttggtttgatttggaatataatcctccactggcaggtcaaaaatgtaatgaaaaatatcatggctggattgcaacaaaccaacagtgaaaagattctcctgagctgggtccgacaatcaactcgtaattatccacaggttaatgtaatcaacttcaccaccagctggtctgatggcctggctttgaatgctctcatccatagtcataggccagacctatttgactggaatagtgtggtttgccagcagtcagccacacaacgactggaacatgcattcaacatcgccagatatcaattaggcatagagaaactactcgatcctgaagatgttgataccacctatccagataagaagtccatcttaatgtacatcacatcactcttccaagttttgcctcaacaagtgagcattgaagccatccaggaagtggaaatgttgccaaggccacctaaagtgactaaagaagaacattttcagttacatcatcaaatgcactattctcaacagatcacggtcagtctagcacagggatatgagagaacttcttcccctaagcctcgattcaagagctatgcctacacacaggctgcttatgtcaccacctctgaccctacacggagcccatttccttcacagcatttggaagctcctgaagacaagtcatttggcagttcattgatggagagtgaagtaaacctggaccgttatcaaacagctttagaagaagtattatcgtggcttctttctgctgaggacacattgcaagcacaaggagagatttctaatgatgtggaagtggtgaaagaccagtttcatactcatgaggggtacatgatggatttgacagcccatcagggccgggttggtaatattctacaattgggaagtaagctgattggaacaggaaaattatcagaagatgaagaaactgaagtacaagagcagatgaatctcctaaattcaagatgggaatgcctcagggtagctagcatggaaaaacaaagcaatttacatagagttttaatggatagatctgttgagaaatggcggcgttttcattatgatataaagatatttaatcagtggctaacagaagctgaacagtttctcagaaagacacaaattcctgagaattgggaacatgctaaatacaaatggtatcttaaggaactccaggatggcattgggcagcggcaaactgttgtcagaacattgaatgcaactggggaagaaataattcagcaatcctcaaaaacagatgccagtattctacaggaaaaattgggaagcctgaatctgcggtggcaggaggtctgcaaacagctgtcagacagaaaaaagaggctagaagaacaaaagaatatcttgtcagaatttcaaagagatttaaatgaatttgttttatggttggaggaagcagataacattgctagtatcccacttgaacctggaaaagagcagcaactaaaagaaaagcttgagcaagtcaagttactggtggaagagttgcccctgcgccagggaattctcaaacaattaaatgaaactggaggacccgtgcttgtaagtgctcccataagcccagaagagcaagataaacttgaaaataagctcaagcagacaaatctccagtggataaaggtttccagagctttacctgagaaacaaggagaaattgaagctcaaataaaagaccttgggcagcttgaaaaaaagcttgaagaccttgaagagcagttaaatcatctgctgctgtggttatctcctattaggaatcagttggaaatttataaccaaccaaaccaagaaggaccatttgacgttaaggaaactgaaatagcagttcaagctaaacaaccggatgtggaagagattttgtctaaagggcagcatttgtacaaggaaaaaccagccactcagccagtgaagaggaagttagaagatctgagctctgagtggaaggcggtaaaccgtttacttcaagagctgagggcaaagcagtggcagagaaaaatagatgagacccttgaaagactccgggaacttcaagaggccacggatgagctggacctcaagctgcgccaagctgaggtgatcaagggatcctggcagcccgtgggcgatctcctcattgactctctccaagatcacctcgagaaagtcaaggcacttcgaggagaaattgcgcctctgaaagagaacgtgagccacgtcaatgaccttgctcgccagcttaccactttgggcattcagctctcaccgtataacctcagcactctggaagacctgaacaccagatggaagcttctgcaggtggccgtcgaggaccgagtcaggcagctgcatgaagcccacagggactttggtccagcatctcagcactttctttccacgtctgtccagggtccctgggagagagccatctcgccaaacaaagtgccctactatatcaaccacgagactcaaacaacttgctgggaccatcccaaaatgacagagctctaccagtctttagctgacctgaataatgtcagattctcagcttataggactgccatgaaactccgaagactgcagaaggccctttgcttggatctcttgagcctgtcagctgcatgtgatgccttggaccagcacaacctcaagcaaaatgaccagcccatggatatcctgcagattattaattgtttgaccactatttatgaccgcctggagcaagagcacaacaatttggtcaacgtccctctctgcgtggatatgtgtctgaactggctgctgaatgtttatgatacgggacgaacagggaggatccgtgtcctgtcttttaaaactggcatcatttccctgtgtaaagcacatttggaagacaagtacagataccttttcaagcaagtggcaagttcaacaggattttgtgaccagcgcaggctgggcctccttctgcatgattctatccaaattccaagacagttgggtgaagttgcatcctttgggggcagtaacattgagccaagtgtccggagctgcttccaatttgctaataataagccagagatcgaagcggccctcttcctagactggatgagactggaaccccagtccatggtgtggctgcccgtcctgcacagagtggctgctgcagaaactgccaagcatcaggccaaatgtaacatctgcaaagagtgtccaatcattggattcaggtacaggagtctaaagcactttaattatgacatctgccaaagctgctttttttctggtcgagttgcaaaaggccataaaatgcactatcccatggtggaatattgcactccgactacatcaggagaagatgttcgagactttgccaaggtactaaaaaacaaatttcgaaccaaaaggtattttgcgaagcatccccgaatgggctacctgccagtgcagactgtcttagagggggacaacatggaaactcccgttactctgatcaacttctggccagtagattctgcgcctgcctcgtcccctcagctttcacacgatgatactcattcacgcattgaacattatgctagcaggctagcagaaatggaaaacagcaatggatcttatctaaatgatagcatctctcctaatgagagcatagatgatgaacatttgttaatccagcattactgccaaagtttgaaccaggactcccccctgagccagcctcgtagtcctgcccagatcttgatttccttagagagtgaggaaagaggggagctagagagaatcctagcagatcttgaggaagaaaacaggaatctgcaagcagaatatgaccgtctaaagcagcagcacgaacataaaggcctgtccccactgccgtcccctcctgaaatgatgcccacctctccccagagtccc

SEQ ID NO: 130 - DNA, 4245 bp, synthetic construct
  source 1..4245: mol_type = other DNA
atgctttggtgggaagaagtagaggactgttatgaaagagaagatgttcaaaagaaaacattcacaaaatgggtaaatgcacaattttctaagtttgggaagcagcatattgagaacctcttcagtgacctacaggatgggaggcgcctcctagacctcctcgaaggcctgacagggcaaaaactgccaaaagaaaaaggatccacaagagttcatgccctgaacaatgtcaacaaggcactgcgggttttgcagaacaataatgttgatttagtgaatattggaagtactgacatcgtagatggaaatcataaactgactcttggtttgatttggaatataatcctccactggcaggtcaaaaatgtaatgaaaaatatcatggctggattgcaacaaaccaacagtgaaaagattctcctgagctgggtccgacaatcaactcgtaattatccacaggttaatgtaatcaacttcaccaccagctggtctgatggcctggctttgaatgctctcatccatagtcataggccagacctatttgactggaatagtgtggtttgccagcagtcagccacacaacgactggaacatgcattcaacatcgccagatatcaattaggcatagagaaactactcgatcctgaagatgttgataccacctatccagataagaagtccatcttaatgtacatcacatcactcttccaagttttgcctcaacaagtgagcattgaagccatccaggaagtggaaatgttgccaaggccacctaaagtgactaaagaagaacattttcagttacatcatcaaatgcactattctcaacagatcacggtcagtctagcacagggatatgagagaacttcttcccctaagcctcgattcaagagctatgcctacacacaggctgcttatgtcaccacctctgaccctacacggagcccatttccttcacagcatttggaagctcctgaagacaagtcatttggcagttcattgatggagagtgaagtaaacctggaccgttatcaaacagctttagaagaagtattatcgtggcttctttctgctgaggacacattgcaagcacaaggagagatttctaatgatgtggaagtggtgaaagaccagtttcatactcatgaggggtacatgatggatttgacagcccatcagggccgggttggtaatattctacaattgggaagtaagctgattggaacaggaaaattatcagaagatgaagaaactgaagtacaagagcagatgaatctcctaaattcaagatgggaatgcctcagggtagctagcatggaaaaacaaagcaatttacatagagttttaatggatagatctgttgagaaatggcggcgttttcattatgatataaagatatttaatcagtggctaacagaagctgaacagtttctcagaaagacacaaattcctgagaattgggaacatgctaaatacaaatggtatcttaaggaactccaggatggcattgggcagcggcaaactgttgtcagaacattgaatgcaactggggaagaaataattcagcaatcctcaaaaacagatgccagtattctacaggaaaaattgggaagcctgaatctgcggtggcaggaggtctgcaaacagctgtcagacagaaaaaagaggctagaagaacaaaagaatatcttgtcagaatttcaaagagatttaaatgaatttgttttatggttggaggaagcagataacattgctagtatcccacttgaacctggaaaagagcagcaactaaaagaaaagcttgagcaagtcaagttactggtggaagagttgcccctgcgccagggaattctcaaacaattaaatgaaactggaggacccgtgcttgtaagtgctcccataagcccagaagagcaagataaacttgaaaataagctcaagcagacaaatctccagtggataaaggtttccagagctttacctgagaaacaaggagaaattgaagctcaaataaaagaccttgggcagcttgaaaaaaagcttgaagaccttgaagagcagttaaatcatctgctgctgtggttatctcctattaggaatcagttggaaatttataaccaaccaaaccaagaaggaccatttgacgttaaggaaactgaaatagcagttcaagctaaacaaccggatgtggaagagattttgtctaaagggcagcatttgtacaaggaaaaaccagccactcagccagtgaagaggaagttagaagatctgagctctgagtggaaggcggtaaaccgtttacttcaagagctgagggcaaagcagggtccagcatctcagcactttctttccacgtctgtccagggtccctgggagagagccatctcgccaaacaaagtgccctactatatcaaccacgagactcaaacaacttgctgggaccatcccaaaatgacagagctctaccagtctttagctgacctgaataatgtcagattctcagcttataggactgccatgaaactccgaagactgcagaaggccctttgcttggatctcttgagcctgtcagctgcatgtgatgccttggaccagcacaacctcaagcaaaatgaccagcccatggatatcctgcagattattaattgtttgaccactatttatgaccgcctggagcaagagcacaacaatttggtcaacgtccctctctgcgtggatatgtgtctgaactggctgctgaatgtttatgatacgggacgaacagggaggatccgtgtcctgtcttttaaaactggcatcatttccctgtgtaaagcacatttggaagacaagtacagataccttttcaagcaagtggcaagttcaacaggattttgtgaccagcgcaggctgggcctccttctgcatgattctatccaaattccaagacagttgggtgaagttgcatcctttgggggcagtaacattgagccaagtgtccggagctgcttccaatttgctaataataagccagagatcgaagcggccctcttcctagactggatgagactggaaccccagtccatggtgtggctgcccgtcctgcacagagtggctgctgcagaaactgccaagcatcaggccaaatgtaacatctgcaaagagtgtccaatcattggattcaggtacaggagtctaaagcactttaattatgacatctgccaaagctgctttttttctggtcgagttgcaaaaggccataaaatgcactatcccatggtggaatattgcactccgactacatcaggagaagatgttcgagactttgccaaggtactaaaaaacaaatttcgaaccaaaaggtattttgcgaagcatccccgaatgggctacctgccagtgcagactgtcttagagggggacaacatggaaactcccgttactctgatcaacttctggccagtagattctgcgcctgcctcgtcccctcagctttcacacgatgatactcattcacgcattgaacattatgctagcaggctagcagaaatggaaaacagcaatggatcttatctaaatgatagcatctctcctaatgagagcatagatgatgaacatttgttaatccagcattactgccaaagtttgaaccaggactcccccctgagccagcctcgtagtcctgcccagatcttgatttccttagagagtgaggaaagaggggagctagagagaatcctagcagatcttgaggaagaaaacaggaatctgcaagcagaatatgaccgtctaaagcagcagcacgaacataaaggcctgtccccactgccgtcccctcctgaaatgatgcccacctctccccagagtccccgggatgctgagctcattgctgaggccaagctactgcgtcaacacaaaggccgcctggaagccaggatgcaaatcctggaagaccacaataaacagctggagtcacagttacacaggctaaggcagctgctggagcaaccccaggcagaggccaaagtgaatggcacaacggtgtcctctccttctacctctctacagaggtccgacagcagtcagcctatgctgctccgagtggttggcagtcaaacttcggactccatgggtgaggaagatcttctcagtcctccccaggacacaagcacagggttagaggaggtgatggagcaactcaacaactccttccctagttcaagaggaagaaatacccctggaaagccaatgagagaggacacaatg

SEQ ID NO: 131 - DNA, 4608 bp, synthetic construct
  source 1..4608: mol_type = other DNA
atgctttggtgggaagaagtagaggactgttatgaaagagaagatgttcaaaagaaaacattcacaaaatgggtaaatgcacaattttctaagtttgggaagcagcatattgagaacctcttcagtgacctacaggatgggaggcgcctcctagacctcctcgaaggcctgacagggcaaaaactgccaaaagaaaaaggatccacaagagttcatgccctgaacaatgtcaacaaggcactgcgggttttgcagaacaataatgttgatttagtgaatattggaagtactgacatcgtagatggaaatcataaactgactcttggtttgatttggaatataatcctccactggcaggtcaaaaatgtaatgaaaaatatcatggctggattgcaacaaaccaacagtgaaaagattctcctgagctgggtccgacaatcaactcgtaattatccacaggttaatgtaatcaacttcaccaccagctggtctgatggcctggctttgaatgctctcatccatagtcataggccagacctatttgactggaatagtgtggtttgccagcagtcagccacacaacgactggaacatgcattcaacatcgccagatatcaattaggcatagagaaactactcgatcctgaagatgttgataccacctatccagataagaagtccatcttaatgtacatcacatcactcttccaagttttgcctcaacaagtgagcattgaagccatccaggaagtggaaatgttgccaaggccacctaaagtgactaaagaagaacattttcagttacatcatcaaatgcactattctcaacagatcacggtcagtctagcacagggatatgagagaacttcttcccctaagcctcgattcaagagctatgcctacacacaggctgcttatgtcaccacctctgaccctacacggagcccatttccttcacagcatttggaagctcctgaagacaagtcatttggcagttcattgatggagagtgaagtaaacctggaccgttatcaaacagctttagaagaagtattatcgtggcttctttctgctgaggacacattgcaagcacaaggagagatttctaatgatgtggaagtggtgaaagaccagtttcatactcatgaggggtacatgatggatttgacagcccatcagggccgggttggtaatattctacaattgggaagtaagctgattggaacaggaaaattatcagaagatgaagaaactgaagtacaagagcagatgaatctcctaaattcaagatgggaatgcctcagggtagctagcatggaaaaacaaagcaatttacatagagttttaatggatagatctgttgagaaatggcggcgttttcattatgatataaagatatttaatcagtggctaacagaagctgaacagtttctcagaaagacacaaattcctgagaattgggaacatgctaaatacaaatggtatcttaaggaactccaggatggcattgggcagcggcaaactgttgtcagaacattgaatgcaactggggaagaaataattcagcaatcctcaaaaacagatgccagtattctacaggaaaaattgggaagcctgaatctgcggtggcaggaggtctgcaaacagctgtcagacagaaaaaagaggctagaagaacaaaagaatatcttgtcagaatttcaaagagatttaaatgaatttgttttatggttggaggaagcagataacattgctagtatcccacttgaacctggaaaagagcagcaactaaaagaaaagcttgagcaagtcaagttactggtggaagagttgcccctgcgccagggaattctcaaacaattaaatgaaactggaggacccgtgcttgtaagtgctcccataagcccagaagagcaagataaacttgaaaataagctcaagcagacaaatctccagtggataaaggtttccagagctttacctgagaaacaaggagaaattgaagctcaaataaaagaccttgggcagcttgaaaaaaagcttgaagaccttgaagagcagttaaatcatctgctgctgtggttatctcctattaggaatcagttggaaatttataaccaaccaaaccaagaaggaccatttgacgttaaggaaactgaaatagcagttcaagctaaacaaccggatgtggaagagattttgtctaaagggcagcatttgtacaaggaaaaaccagccactcagccagtgaagaggaagttagaagatctgagctctgagtggaaggcggtaaaccgtttacttcaagagctgagggcaaagcagtggcagagaaaaatagatgagacccttgaaagactccgggaacttcaagaggccacggatgagctggacctcaagctgcgccaagctgaggtgatcaagggatcctggcagcccgtgggcgatctcctcattgactctctccaagatcacctcgagaaagtcaaggcacttcgaggagaaattgcgcctctgaaagagaacgtgagccacgtcaatgaccttgctcgccagcttaccactttgggcattcagctctcaccgtataacctcagcactctggaagacctgaacaccagatggaagcttctgcaggtggccgtcgaggaccgagtcaggcagctgcatgaagcccacagggactttggtccagcatctcagcactttctttccacgtctgtccagggtccctgggagagagccatctcgccaaacaaagtgccctactatatcaaccacgagactcaaacaacttgctgggaccatcccaaaatgacagagctctaccagtctttagctgacctgaataatgtcagattctcagcttataggactgccatgaaactccgaagactgcagaaggccctttgcttggatctcttgagcctgtcagctgcatgtgatgccttggaccagcacaacctcaagcaaaatgaccagcccatggatatcctgcagattattaattgtttgaccactatttatgaccgcctggagcaagagcacaacaatttggtcaacgtccctctctgcgtggatatgtgtctgaactggctgctgaatgtttatgatacgggacgaacagggaggatccgtgtcctgtcttttaaaactggcatcatttccctgtgtaaagcacatttggaagacaagtacagataccttttcaagcaagtggcaagttcaacaggattttgtgaccagcgcaggctgggcctccttctgcatgattctatccaaattccaagacagttgggtgaagttgcatcctttgggggcagtaacattgagccaagtgtccggagctgcttccaatttgctaataataagccagagatcgaagcggccctcttcctagactggatgagactggaaccccagtccatggtgtggctgcccgtcctgcacagagtggctgctgcagaaactgccaagcatcaggccaaatgtaacatctgcaaagagtgtccaatcattggattcaggtacaggagtctaaagcactttaattatgacatctgccaaagctgctttttttctggtcgagttgcaaaaggccataaaatgcactatcccatggtggaatattgcactccgactacatcaggagaagatgttcgagactttgccaaggtactaaaaaacaaatttcgaaccaaaaggtattttgcgaagcatccccgaatgggctacctgccagtgcagactgtcttagagggggacaacatggaaactcccgttactctgatcaacttctggccagtagattctgcgcctgcctcgtcccctcagctttcacacgatgatactcattcacgcattgaacattatgctagcaggctagcagaaatggaaaacagcaatggatcttatctaaatgatagcatctctcctaatgagagcatagatgatgaacatttgttaatccagcattactgccaaagtttgaaccaggactcccccctgagccagcctcgtagtcctgcccagatcttgatttccttagagagtgaggaaagaggggagctagagagaatcctagcagatcttgaggaagaaaacaggaatctgcaagcagaatatgaccgtctaaagcagcagcacgaacataaaggcctgtccccactgccgtcccctcctgaaatgatgcccacctctccccagagtccccgggatgctgagctcattgctgaggccaagctactgcgtcaacacaaaggccgcctggaagccaggatgcaaatcctggaagaccacaataaacagctggagtcacagttacacaggctaaggcagctgctggagcaaccccaggcagaggccaaagtgaatggcacaacggtgtcctctccttctacctctctacagaggtccgacagcagtcagcctatgctgctccgagtggttggcagtcaaacttcggactccatgggtgaggaagatcttctcagtcctccccaggacacaagcacagggttagaggaggtgatggagcaactcaacaactccttccctagttcaagaggaagaaatacccctggaaagccaatgagagaggacacaatg

SEQ ID NO: 132 - protein, 1440 aa, synthetic construct
MLWWEEVEDCYEREDVQKKTFTKWVNAQFSKFGKQHIENLFSDLQDGRRLLDLLEGLTGQKLPKEKGSTRVHALNNVNKALRVLQNNNVDLVNIGSTDIVDGNHKLTLGLIWNIILHWQVKNVMKNIMAGLQQTNSEKILLSWVRQSTRNYPQVNVINFTTSWSDGLALNALIHSHRPDLFDWNSVVCQQSATQRLEHAFNIARYQLGIEKLLDPEDVDTTYPDKKSILMYITSLFQVLPQQVSIEAIQEVEMLPRPPKVTKEEHFQLHHQMHYSQQITVSLAQGYERTSSPKPRFKSYAYTQAAYVTTSDPTRSPFPSQHLEAPEDKSFGSSLMESEVNLDRYQTALEEVLSWLLSAEDTLQAQGEISNDVEVVKDQFHTHEGYMMDLTAHQGRVGNILQLGSKLIGTGKLSEDEETEVQEQMNLLNSRWECLRVASMEKQSNLHRVLMDLQNQKLKELNDWLTKTEERTRKMEEEPLGPDLEDLKRQVQQHKVLQEDLEQEQVRVNSLTHMVVVVDESSGDHATAALEEQLKVLGDRWANICRWTEDRWVLLQDASSDQWKRLHLSLQELLVWLQLKDDELSRQAPIGGDFPAVQKQNDVHRAFKRELKTKEPVIMSTLETVRIFLTEQPLEGLEKLYQEPRELPPEERAQNVTRLLRKQAEEVNTEWEKLNLHSADWQRKIDETLERLQELQEATDELDLKLRQAEVIKGSWQPVGDLLIDSLQDHLEKVKALRGEIAPLKENVSHVNDLARQLTTLGIQLSPYNLSTLEDLNTRWKLLQVAVEDRVRQLHEAHRDFGPASQHFLSTSVQGPWERAISPNKVPYYINHETQTTCWDHPKMTELYQSLADLNNVRFSAYRTAMKLRRLQKALCLDLLSLSAACDALDQHNLKQNDQPMDILQIINCLTTIYDRLEQEHNNLVNVPLCVDMCLNWLLNVYDTGRTGRIRVLSFKTGIISLCKAHLEDKYRYLFKQVASSTGFCDQRRLGLLLHDSIQIPRQLGEVASFGGSNIEPSVRSCFQFANNKPEIEAALFLDWMRLEPQSMVWLPVLHRVAAAETAKHQAKCNICKECPIIGFRYRSLKHFNYDICQSCFFSGRVAKGHKMHYPMVEYCTPTTSGEDVRDFAKVLKNKFRTKRYFAKHPRMGYLPVQTVLEGDNMETPVTLINFWPVDSAPASSPQLSHDDTHSRIEHYASRLAEMENSNGSYLNDSISPNESIDDEHLLIQHYCQSLNQDSPLSQPRSPAQILISLESEERGELERILADLEEENRNLQAEYDRLKQQHEHKGLSPLPSPPEMMPTSPQSPRDAELIAEAKLLRQHKGRLEARMQILEDHNKQLESQLHRLRQLLEQPQAEAKVNGTTVSSPSTSLQRSDSSQPMLLRVVGSQTSDSMGEEDLLSPPQDTSTGLEEVMEQLNNSFPSSRGRNTPGKPMREDTM

SEQ ID NO: 133 - DNA, 4320 bp, synthetic construct
  source 1..4320: mol_type = other DNA
atgctttggtgggaagaagtagaggactgttatgaaagagaagatgttcaaaagaaaacattcacaaaatgggtaaatgcacaattttctaagtttgggaagcagcatattgagaacctcttcagtgacctacaggatgggaggcgcctcctagacctcctcgaaggcctgacagggcaaaaactgccaaaagaaaaaggatccacaagagttcatgccctgaacaatgtcaacaaggcactgcgggttttgcagaacaataatgttgatttagtgaatattggaagtactgacatcgtagatggaaatcataaactgactcttggtttgatttggaatataatcctccactggcaggtcaaaaatgtaatgaaaaatatcatggctggattgcaacaaaccaacagtgaaaagattctcctgagctgggtccgacaatcaactcgtaattatccacaggttaatgtaatcaacttcaccaccagctggtctgatggcctggctttgaatgctctcatccatagtcataggccagacctatttgactggaatagtgtggtttgccagcagtcagccacacaacgactggaacatgcattcaacatcgccagatatcaattaggcatagagaaactactcgatcctgaagatgttgataccacctatccagataagaagtccatcttaatgtacatcacatcactcttccaagttttgcctcaacaagtgagcattgaagccatccaggaagtggaaatgttgccaaggccacctaaagtgactaaagaagaacattttcagttacatcatcaaatgcactattctcaacagatcacggtcagtctagcacagggatatgagagaacttcttcccctaagcctcgattcaagagctatgcctacacacaggctgcttatgtcaccacctctgaccctacacggagcccatttccttcacagcatttggaagctcctgaagacaagtcatttggcagttcattgatggagagtgaagtaaacctggaccgttatcaaacagctttagaagaagtattatcgtggcttctttctgctgaggacacattgcaagcacaaggagagatttctaatgatgtggaagtggtgaaagaccagtttcatactcatgaggggtacatgatggatttgacagcccatcagggccgggttggtaatattctacaattgggaagtaagctgattggaacaggaaaattatcagaagatgaagaaactgaagtacaagagcagatgaatctcctaaattcaagatgggaatgcctcagggtagctagcatggaaaaacaaagcaatttacatagagttttaatggatctccagaatcagaaactgaaagagttgaatgactggctaacaaaaacagaagaaagaacaaggaaaatggaggaagagcctcttggacctgatcttgaagacctaaaacgccaagtacaacaacataaggtgcttcaagaagatctagaacaagaacaagtcagggtcaattctctcactcacatggtggtggtagttgatgaatctagtggagatcacgcaactgctgctttggaagaacaacttaaggtattgggagatcgatgggcaaacatctgtagatggacagaagaccgctgggttcttttacaagacgccagttctgaccagtggaagcgtctgcacctttctctgcaggaacttctggtgtggctacagctgaaagatgatgaattaagccggcaggcacctattggaggcgactttccagcagttcagaagcagaacgatgtacatagggccttcaagagggaattgaaaactaaagaacctgtaatcatgagtactcttgagactgtacgaatatttctgacagagcagcctttggaaggactagagaaactctaccaggagcccagagagctgcctcctgaggagagagcccagaatgtcactcggcttctacgaaagcaggctgaggaggtcaatactgagtgggaaaaattgaacctgcactccgctgactggcagagaaaaatagatgagacccttgaaagactccgggaacttcaagaggccacggatgagctggacctcaagctgcgccaagctgaggtgatcaagggatcctggcagcccgtgggcgatctcctcattgactctctccaagatcacctcgagaaagtcaaggcacttcgaggagaaattgcgcctctgaaagagaacgtgagccacgtcaatgaccttgctcgccagcttaccactttgggcattcagctctcaccgtataacctcagcactctggaagacctgaacaccagatggaagcttctgcaggtggccgtcgaggaccgagtcaggcagctgcatgaagcccacagggactttggtccagcatctcagcactttctttccacgtctgtccagggtccctgggagagagccatctcgccaaacaaagtgccctactatatcaaccacgagactcaaacaacttgctgggaccatcccaaaatgacagagctctaccagtctttagctgacctgaataatgtcagattctcagcttataggactgccatgaaactccgaagactgcagaaggccctttgcttggatctcttgagcctgtcagctgcatgtgatgccttggaccagcacaacctcaagcaaaatgaccagcccatggatatcctgcagattattaattgtttgaccactatttatgaccgcctggagcaagagcacaacaatttggtcaacgtccctctctgcgtggatatgtgtctgaactggctgctgaatgtttatgatacgggacgaacagggaggatccgtgtcctgtcttttaaaactggcatcatttccctgtgtaaagcacatttggaagacaagtacagataccttttcaagcaagtggcaagttcaacaggattttgtgaccagcgcaggctgggcctccttctgcatgattctatccaaattccaagacagttgggtgaagttgcatcctttgggggcagtaacattgagccaagtgtccggagctgcttccaatttgctaataataagccagagatcgaagcggccctcttcctagactggatgagactggaaccccagtccatggtgtggctgcccgtcctgcacagagtggctgctgcagaaactgccaagcatcaggccaaatgtaacatctgcaaagagtgtccaatcattggattcaggtacaggagtctaaagcactttaattatgacatctgccaaagctgctttttttctggtcgagttgcaaaaggccataaaatgcactatcccatggtggaatattgcactccgactacatcaggagaagatgttcgagactttgccaaggtactaaaaaacaaatttcgaaccaaaaggtattttgcgaagcatccccgaatgggctacctgccagtgcagactgtcttagagggggacaacatggaaactcccgttactctgatcaacttctggccagtagattctgcgcctgcctcgtcccctcagctttcacacgatgatactcattcacgcattgaacattatgctagcaggctagcagaaatggaaaacagcaatggatcttatctaaatgatagcatctctcctaatgagagcatagatgatgaacatttgttaatccagcattactgccaaagtttgaaccaggactcccccctgagccagcctcgtagtcctgcccagatcttgatttccttagagagtgaggaaagaggggagctagagagaatcctagcagatcttgaggaagaaaacaggaatctgcaagcagaatatgaccgtctaaagcagcagcacgaacataaaggcctgtccccactgccgtcccctcctgaaatgatgcccacctctccccagagtccccgggatgctgagctcattgctgaggccaagctactgcgtcaacacaaaggccgcctggaagccaggatgcaaatcctggaagaccacaataaacagctggagtcacagttacacaggctaaggcagctgctggagcaaccccaggcagaggccaaagtgaatggcacaacggtgtcctctccttctacctctctacagaggtccgacagcagtcagcctatgctgctccgagtggttggcagtcaaacttcggactccatgggtgaggaagatcttctcagtcctccccaggacacaagcacagggttagaggaggtgatggagcaactcaacaactccttccctagttcaagaggaagaaatacccctggaaagccaatgagagaggacacaatg

SEQ ID NO: 134 - DNA, 4320 bp, synthetic construct
  source 1..4320: mol_type = other DNA
atgctgtggtgggaggaggtggaggactgctacgagcgggaggacgtgcagaagaagaccttcaccaagtgggtgaacgcccagttcagcaagttcggcaagcagcacatcgagaacctgttcagcgacctgcaggacggccggcggctgctggacctgctggagggcctgaccggccagaagctgcccaaggagaagggcagcacccgggtgcacgccctgaacaacgtgaacaaggccctgcgggtgctgcagaacaacaacgtggacctggtgaacatcggcagcaccgacatcgtggacggcaaccacaagctgaccctgggcctgatctggaacatcatcctgcactggcaggtgaagaacgtgatgaagaacatcatggccggcctgcagcagaccaacagcgagaagatcctgctgagctgggtgcggcagagcacccggaactacccccaggtgaacgtgatcaacttcaccaccagctggagcgacggcctggccctgaacgccctgatccacagccaccggcccgacctgttcgactggaacagcgtggtgtgccagcagagcgccacccagcggctggagcacgccttcaacatcgcccggtaccagctgggcatcgagaagctgctggaccccgaggacgtggacaccacctaccccgacaagaagagcatcctgatgtacatcaccagcctgttccaggtgctgccccagcaggtgagcatcgaggccatccaggaggtggagatgctgccccggccccccaaggtgaccaaggaggagcacttccagctgcaccaccagatgcactacagccagcagatcaccgtgagcctggcccagggctacgagcggaccagcagccccaagccccggttcaagagctacgcctacacccaggccgcctacgtgaccaccagcgaccccacccggagccccttccccagccagcacctggaggcccccgaggacaagagcttcggcagcagcctgatggagagcgaggtgaacctggaccggtaccagaccgccctggaggaggtgctgagctggctgctgagcgccgaggacaccctgcaggcccagggcgagatcagcaacgacgtggaggtggtgaaggaccagttccacacccacgagggctacatgatggacctgaccgcccaccagggccgggtgggcaacatcctgcagctgggcagcaagctgatcggcaccggcaagctgagcgaggacgaggagaccgaggtgcaggagcagatgaacctgctgaacagccggtgggagtgcctgcgggtggccagcatggagaagcagagcaacctgcaccgggtgctgatggacctgcagaaccagaagctgaaggagctgaacgactggctgaccaagaccgaggagcggacccggaagatggaggaggagcccctgggccccgacctggaggacctgaagcggcaggtgcagcagcacaaggtgctgcaggaggacctggagcaggagcaggtgcgggtgaacagcctgacccacatggtggtggtggtggacgagagcagcggcgaccacgccaccgccgccctggaggagcagctgaaggtgctgggcgaccggtgggccaacatctgccggtggaccgaggaccggtgggtgctgctgcaggacgccagcagcgaccagtggaagcggctgcacctgagcctgcaggagctgctggtgtggctgcagctgaaggacgacgagctgagccggcaggcccccatcggcggcgacttccccgccgtgcagaagcagaacgacgtgcaccgggccttcaagcgggagctgaagaccaaggagcccgtgatcatgagcaccctggagaccgtgcggatcttcctgaccgagcagcccctggagggcctggagaagctgtaccaggagccccgggagctgccccccgaggagcgggcccagaacgtgacccggctgctgcggaagcaggccgaggaggtgaacaccgagtgggagaagctgaacctgcacagcgccgactggcagcggaagatcgacgagaccctggagcggctgcaggagctgcaggaggccaccgacgagctggacctgaagctgcggcaggccgaggtgatcaagggcagctggcagcccgtgggcgacctgctgatcgacagcctgcaggaccacctggagaaggtgaaggccctgcggggcgagatcgcccccctgaaggagaacgtgagccacgtgaacgacctggcccggcagctgaccaccctgggcatccagctgagcccctacaacctgagcaccctggaggacctgaacacccggtggaagctgctgcaggtggccgtggaggaccgggtgcggcagctgcacgaggcccaccgggacttcggccccgccagccagcacttcctgagcaccagcgtgcagggcccctgggagcgggccatcagccccaacaaggtgccctactacatcaaccacgagacccagaccacctgctgggaccaccccaagatgaccgagctgtaccagagcctggccgacctgaacaacgtgcggttcagcgcctaccggaccgccatgaagctgcggcggctgcagaaggccctgtgcctggacctgctgagcctgagcgccgcctgcgacgccctggaccagcacaacctgaagcagaacgaccagcccatggacatcctgcagatcatcaactgcctgaccaccatctacgaccggctggagcaggagcacaacaacctggtgaacgtgcccctgtgcgtggacatgtgcctgaactggctgctgaacgtgtacgacaccggccggaccggccggatccgggtgctgagcttcaagaccggcatcatcagcctgtgcaaggcccacctggaggacaagtaccggtacctgttcaagcaggtggccagcagcaccggcttctgcgaccagcggcggctgggcctgctgctgcacgacagcatccagatcccccggcagctgggcgaggtggccagcttcggcggcagcaacatcgagcccagcgtgcggagctgcttccagttcgccaacaacaagcccgagatcgaggccgccctgttcctggactggatgcggctggagccccagagcatggtgtggctgcccgtgctgcaccgggtggccgccgccgagaccgccaagcaccaggccaagtgcaacatctgcaaggagtgccccatcatcggcttccggtaccggagcctgaagcacttcaactacgacatctgccagagctgcttcttcagcggccgggtggccaagggccacaagatgcactaccccatggtggagtactgcacccccaccaccagcggcgaggacgtgcgggacttcgccaaggtgctgaagaacaagttccggaccaagcggtacttcgccaagcacccccggatgggctacctgcccgtgcagaccgtgctggagggcgacaacatggagacccccgtgaccctgatcaacttctggcccgtggacagcgcccccgccagcagcccccagctgagccacgacgacacccacagccggatcgagcactacgccagccggctggccgagatggagaacagcaacggcagctacctgaacgacagcatcagccccaacgagagcatcgacgacgagcacctgctgatccagcactactgccagagcctgaaccaggacagccccctgagccagccccggagccccgcccagatcctgatcagcctggagagcgaggagcggggcgagctggagcggatcctggccgacctggaggaggagaaccggaacctgcaggccgagtacgaccggctgaagcagcagcacgagcacaagggcctgagccccctgcccagcccccccgagatgatgcccaccagcccccagagcccccgggacgccgagctgatcgccgaggccaagctgctgcggcagcacaagggccggctggaggcccggatgcagatcctggaggaccacaacaagcagctggagagccagctgcaccggctgcggcagctgctggagcagccccaggccgaggccaaggtgaacggcaccaccgtgagcagccccagcaccagcctgcagcggagcgacagcagccagcccatgctgctgcgggtggtgggcagccagaccagcgacagcatgggcgaggaggacctgctgagccccccccaggacaccagcaccggcctggaggaggtgatggagcagctgaacaacagcttccccagcagccggggccggaacacccccggcaagcccatgcgggaggacaccatg

SEQ ID NO: 135 - DNA, 4194 bp, Homo sapiens
  source 1..4194: mol_type = genomic DNA
atggccaagtatggagaacatgaagccagtcctgacaatgggcagaacgaattcagtgatatcattaagtccagatctgatgaacacaatgacgtacagaagaaaacctttaccaaatggataaatgctcgattttcaaagagtgggaaaccacccatcaatgatatgttcacagacctcaaagatggaaggaagctattggatcttctagaaggcctcacaggaacatcactgccaaaggaacgtggttccacaagggtacatgccttaaataacgtcaacagagtgctgcaggttttacatcagaacaatgtggaattagtgaatatagggggaactgacattgtggatggaaatcacaaactgactttggggttactttggagcatcattttgcactggcaggtgaaagatgtcatgaaggatgtcatgtcggacctgcagcagacgaacagtgagaagatcctgctcagctgggtgcgtcagaccaccaggccctacagccaagtcaacgtcctcaacttcaccaccagctggacagatggactcgcctttaatgctgtcctccaccgacataaacctgatctcttcagctgggataaagttgtcaaaatgtcaccaattgagagacttgaacatgccttcagcaaggctcaaacttatttgggaattgaaaagctgttagatcctgaagatgttgccgttcagcttcctgacaagaaatccataattatgtatttaacatctttgtttgaggtgctacctcagcaagtcaccatagacgccatccgtgaggtagagacactcccaaggaaatataaaaaagaatgtgaagaagaggcaattaatatacagagtacagcgcctgaggaggagcatgagagtccccgagctgaaactcccagcactgtcactgaggttgacatggatctggacagctatcagattgcgttggaggaagtgctgacctggttgctttctgctgaggacactttccaggagcaggatgatatttctgatgatgttgaagaagtcaaagaccagtttgcaacccatgaagcttttatgatggaactgactgcacaccagagcagtgtgggcagcgtcctgcaggcaggcaaccaactgataacacaaggaactctgtcagacgaagaagaatttgagattcaggaacagatgaccctgctgaatgctagatgggaggctcttagggtggagagtatggacagacagtcccggctgcacgatgtgctgatggaactgcagaagaagcaactgcagcagctctccgcctggttaacactcacagaggagcgcattcagaagatggaaacttgccccctggatgatgatgtaaaatctctacaaaagctgctagaagaacataaaagtttgcaaagtgatcttgaggctgaacaggtgaaagtaaattcactaactcacatggtggtcattgttgatgaaaacagtggtgagagtgctacagctatcctagaagaccagttacagaaacttggtgagcgctggacagcagtatgccgttggactgaagaacgctggaataggttacaagaaatcaatatattgtggcaggaattattggaagaacagtgcttgttgaaagcttggttaaccgaaaaagaagaggctttaaataaagtccagacaagcaacttcaaagaccaaaaggaactaagtgtcagtgttcgacgtctggctattttgaaggaagacatggaaatgaagcgtcaaacattggatcagctgagtgagattggccaggatgtgggacaattacttgataattccaaggcatctaagaagatcaacagtgactcagaggaactgactcaaagatgggattctttggttcagagactagaagattcctccaaccaggtgactcaggctcagagaaaaatagatgagacccttgaaagactccgggaacttcaagaggccacggatgagctggacctcaagctgcgccaagctgaggtgatcaagggatcctggcagcccgtgggcgatctcctcattgactctctccaagatcacctcgagaaagtcaaggcacttcgaggagaaattgcgcctctgaaagagaacgtgagccacgtcaatgaccttgctcgccagcttaccactttgggcattcagctctcaccgtataacctcagcactctggaagacctgaacaccagatggaagcttctgcaggtggccgtcgaggaccgagtcaggcagctgcatgaagcccacagggactttggtccagcatctcagcactttctttccacgtctgtccagggtccctgggagagagccatctcgccaaacaaagtgccctactatatcaaccacgagactcaaacaacttgctgggaccatcccaaaatgacagagctctaccagtctttagctgacctgaataatgtcagattctcagcttataggactgccatgaaactccgaagactgcagaaggccctttgcttggatctcttgagcctgtcagctgcatgtgatgccttggaccagcacaacctcaagcaaaatgaccagcccatggatatcctgcagattattaattgtttgaccactatttatgaccgcctggagcaagagcacaacaatttggtcaacgtccctctctgcgtggatatgtgtctgaactggctgctgaatgtttatgatacgggacgaacagggaggatccgtgtcctgtcttttaaaactggcatcatttccctgtgtaaagcacatttggaagacaagtacagataccttttcaagcaagtggcaagttcaacaggattttgtgaccagcgcaggctgggcctccttctgcatgattctatccaaattccaagacagttgggtgaagttgcatcctttgggggcagtaacattgagccaagtgtccggagctgcttccaatttgctaataataagccagagatcgaagcggccctcttcctagactggatgagactggaaccccagtccatggtgtggctgcccgtcctgcacagagtggctgctgcagaaactgccaagcatcaggccaaatgtaacatctgcaaagagtgtccaatcattggattcaggtacaggagtctaaagcactttaattatgacatctgccaaagctgctttttttctggtcgagttgcaaaaggccataaaatgcactatcccatggtggaatattgcactccgactacatcaggagaagatgttcgagactttgccaaggtactaaaaaacaaatttcgaaccaaaaggtattttgcgaagcatccccgaatgggctacctgccagtgcagactgtcttagagggggacaacatggaaactcccgttactctgatcaacttctggccagtagattctgcgcctgcctcgtcccctcagctttcacacgatgatactcattcacgcattgaacattatgctagcaggctagcagaaatggaaaacagcaatggatcttatctaaatgatagcatctctcctaatgagagcatagatgatgaacatttgttaatccagcattactgccaaagtttgaaccaggactcccccctgagccagcctcgtagtcctgcccagatcttgatttccttagagagtgaggaaagaggggagctagagagaatcctagcagatcttgaggaagaaaacaggaatctgcaagcagaatatgaccgtctaaagcagcagcacgaacataaaggcctgtccccactgccgtcccctcctgaaatgatgcccacctctccccagagtccccgggatgctgagctcattgctgaggccaagctactgcgtcaacacaaaggccgcctggaagccaggatgcaaatcctggaagaccacaataaacagctggagtcacagttacacaggctaaggcagctgctggagcaaccccaggcagaggccaaagtgaatggcacaacggtgtcctctccttctacctctctacagaggtccgacagcagtcagcctatgctgctccgagtggttggcagtcaaacttcggactccatgggtgaggaagatcttctcagtcctccccaggacacaagcacagggttagaggaggtgatggagcaactcaacaactccttccctagttcaagaggaagaaatacccctggaaagccaatgagagaggacacaatg

SEQ ID NO: 136 - DNA, 4206 bp, synthetic construct
  source 1..4206: mol_type = other DNA
atggccaagtacggcgagcacgaggccagccccgacaacggccagaacgagttcagcgacatcatcaagagccggagcgacgagcacaacgacgtgcagaagaagaccttcaccaagtggatcaacgcccggttcagcaagagcggcaagccccccatcaacgacatgttcaccgacctgaaggacggccggaagctgctggacctgctggagggcctgaccggcaccagcctgcccaaggagcggggcagcacccgggtgcacgccctgaacaacgtgaaccgggtgctgcaggtgctgcaccagaacaacgtggagctggtgaacatcggcggcaccgacatcgtggacggcaaccacaagctgaccctgggcctgctgtggagcatcatcctgcactggcaggtgaaggacgtgatgaaggacgtgatgagcgacctgcagcagaccaacagcgagaagatcctgctgagctgggtgcggcagaccacccggccctacagccaggtgaacgtgctgaacttcaccaccagctggaccgacggcctggccttcaacgccgtgctgcaccggcacaagcccgacctgttcagctgggacaaggtggtgaagatgagccccatcgagcggctggagcacgccttcagcaaggcccagacctacctgggcatcgagaagctgctggaccccgaggacgtggccgtgcagctgcccgacaagaagagcatcatcatgtacctgaccagcctgttcgaggtgctgccccagcaggtgaccatcgacgccatccgggaggtggagaccctgccccggaagtacaagaaggagtgcgaggaggaggccatcaacatccagagcaccgcccccgaggaggagcacgagagcccccgggccgagacccccagcaccgtgaccgaggtggacatggacctggacagctaccagatcgccctggaggaggtgctgacctggctgctgagcgccgaggacaccttccaggagcaggacgacatcagcgacgacgtggaggaggtgaaggaccagttcgccacccacgaggccttcatgatggagctgaccgcccaccagagcagcgtgggcagcgtgctgcaggccggcaaccagctgatcacccagggcaccctgagcgacgaggaggagttcgagatccaggagcagatgaccctgctgaacgcccggtgggaggccctgcgggtggagagcatggaccggcagagccggctgcacgacgtgctgatggagctgcagaagaagcagctgcagcagctgagcgcctggctgaccctgaccgaggagcggatccagaagatggagacctgccccctggacgacgacgtgaagagcctgcagaagctgctggaggagcacaagagcctgcagagcgacctggaggccgagcaggtgaaggtgaacagcctgacccacatggtggtgatcgtggacgagaacagcggcgagagcgccaccgccatcctggaggaccagctgcagaagctgggcgagcggtggaccgccgtgtgccggtggaccgaggagcggtggaaccggctgcaggagatcaacatcctgtggcaggagctgctggaggagcagtgcctgctgaaggcctggctgaccgagaaggaggaggccctgaacaaggtgcagaccagcaacttcaaggaccagaaggagctgagcgtgagcgtgcggcggctggccatcctgaaggaggacatggagatgaagcggcagaccctggaccagctgagcgagatcggccaggacgtgggccagctgctggacaacagcaaggccagcaagaagatcaacagcgacagcgaggagctgacccagcggtgggacagcctggtgcagcggctggaggacagcagcaaccaggtgacccaggccgccgctagcgcccagagaaaaatagatgagacccttgaaagactccgggaacttcaagaggccacggatgagctggacctcaagctgcgccaagctgaggtgatcaagggatcctggcagcccgtgggcgatctcctcattgactctctccaagatcacctcgagaaagtcaaggcacttcgaggagaaattgcgcctctgaaagagaacgtgagccacgtcaatgaccttgctcgccagcttaccactttgggcattcagctctcaccgtataacctcagcactctggaagacctgaacaccagatggaagcttctgcaggtggccgtcgaggaccgagtcaggcagctgcatgaagcccacagggactttggtccagcatctcagcactttctttccacgtctgtccagggtccctgggagagagccatctcgccaaacaaagtgccctactatatcaaccacgagactcaaacaacttgctgggaccatcccaaaatgacagagctctaccagtctttagctgacctgaataatgtcagattctcagcttataggactgccatgaaactccgaagactgcagaaggccctttgcttggatctcttgagcctgtcagctgcatgtgatgccttggaccagcacaacctcaagcaaaatgaccagcccatggatatcctgcagattattaattgtttgaccactatttatgaccgcctggagcaagagcacaacaatttggtcaacgtccctctctgcgtggatatgtgtctgaactggctgctgaatgtttatgatacgggacgaacagggaggatccgtgtcctgtcttttaaaactggcatcatttccctgtgtaaagcacatttggaagacaagtacagataccttttcaagcaagtggcaagttcaacaggattttgtgaccagcgcaggctgggcctccttctgcatgattctatccaaattccaagacagttgggtgaagttgcatcctttgggggcagtaacattgagccaagtgtccggagctgcttccaatttgctaataataagccagagatcgaagcggccctcttcctagactggatgagactggaaccccagtccatggtgtggctgcccgtcctgcacagagtggctgctgcagaaactgccaagcatcaggccaaatgtaacatctgcaaagagtgtccaatcattggattcaggtacaggagtctaaagcactttaattatgacatctgccaaagctgctttttttctggtcgagttgcaaaaggccataaaatgcactatcccatggtggaatattgcactccgactacatcaggagaagatgttcgagactttgccaaggtactaaaaaacaaatttcgaaccaaaaggtattttgcgaagcatccccgaatgggctacctgccagtgcagactgtcttagagggggacaacatggaaactcccgttactctgatcaacttctggccagtagattctgcgcctgcctcgtcccctcagctttcacacgatgatactcattcacgcattgaacattatgctagcaggctagcagaaatggaaaacagcaatggatcttatctaaatgatagcatctctcctaatgagagcatagatgatgaacatttgttaatccagcattactgccaaagtttgaaccaggactcccccctgagccagcctcgtagtcctgcccagatcttgatttccttagagagtgaggaaagaggggagctagagagaatcctagcagatcttgaggaagaaaacaggaatctgcaagcagaatatgaccgtctaaagcagcagcacgaacataaaggcctgtccccactgccgtcccctcctgaaatgatgcccacctctccccagagtccccgggatgctgagctcattgctgaggccaagctactgcgtcaacacaaaggccgcctggaagccaggatgcaaatcctggaagaccacaataaacagctggagtcacagttacacaggctaaggcagctgctggagcaaccccaggcagaggccaaagtgaatggcacaacggtgtcctctccttctacctctctacagaggtccgacagcagtcagcctatgctgctccgagtggttggcagtcaaacttcggactccatgggtgaggaagatcttctcagtcctccccaggacacaagcacagggttagaggaggtgatggagcaactcaacaactccttccctagttcaagaggaagaaatacccctggaaagccaatgagagaggacacaatg

SEQ ID NO: 137 - DNA, 3621 bp, Homo sapiens
  source 1..3621: mol_type = genomic DNA
atggccaagtatggagaacatgaagccagtcctgacaatgggcagaacgaattcagtgatatcattaagtccagatctgatgaacacaatgacgtacagaagaaaacctttaccaaatggataaatgctcgattttcaaagagtgggaaaccacccatcaatgatatgttcacagacctcaaagatggaaggaagctattggatcttctagaaggcctcacaggaacatcactgccaaaggaacgtggttccacaagggtacatgccttaaataacgtcaacagagtgctgcaggttttacatcagaacaatgtggaattagtgaatatagggggaactgacattgtggatggaaatcacaaactgactttggggttactttggagcatcattttgcactggcaggtgaaagatgtcatgaaggatgtcatgtcggacctgcagcagacgaacagtgagaagatcctgctcagctgggtgcgtcagaccaccaggccctacagccaagtcaacgtcctcaacttcaccaccagctggacagatggactcgcctttaatgctgtcctccaccgacataaacctgatctcttcagctgggataaagttgtcaaaatgtcaccaattgagagacttgaacatgccttcagcaaggctcaaacttatttgggaattgaaaagctgttagatcctgaagatgttgccgttcagcttcctgacaagaaatccataattatgtatttaacatctttgtttgaggtgctacctcagcaagtcaccatagacgccatccgtgaggtagagacactcccaaggaaatataaaaaagaatgtgaagaagaggcaattaatatacagagtacagcgcctgaggaggagcatgagagtccccgagctgaaactcccagcactgtcactgaggttgacatggatctggacagctatcagattgcgttggaggaagtgctgacctggttgctttctgctgaggacactttccaggagcaggatgatatttctgatgatgttgaagaagtcaaagaccagtttgcaacccatgaagcttttatgatggaactgactgcacaccagagcagtgtgggcagcgtcctgcaggcaggcaaccaactgataacacaaggaactctgtcagacgaagaagaatttgagattcaggaacagatgaccctgctgaatgctagatgggaggctcttagggtggagagtatggacagacagtcccggctgcacgatgtgctgatggaactgcagaagaagcaactgcagcagctctccgcctggttaacactcacagaggagcgcattcagaagatggaaacttgccccctggatgatgatgtaaaatctctacaaaagctgctagaagaacataaaagtttgcaaagtgatcttgaggctgaacaggtgaaagtaaattcactaactcacatggtggtcattgttgatgaaaacagtggtgagagtgctacagctatcctagaagaccagttacagaaacttggtgagcgctggacagcagtatgccgttggactgaagaacgctggaataggttacaagaaatcaatatattgtggcaggaattattggaagaacagtgcttgttgaaagcttggttaaccgaaaaagaagaggctttaaataaagtccagacaagcaacttcaaagaccaaaaggaactaagtgtcagtgttcgacgtctggctattttgaaggaagacatggaaatgaagcgtcaaacattggatcagctgagtgagattggccaggatgtgggacaattacttgataattccaaggcatctaagaagatcaacagtgactcagaggaactgactcaaagatgggattctttggttcagagactagaagattcctccaaccaggtgactcaggctgccgctagcgcccagagaaaaatagatgagacccttgaaagactccgggaacttcaagaggccacggatgagctggacctcaagctgcgccaagctgaggtgatcaagggatcctggcagcccgtgggcgatctcctcattgactctctccaagatcacctcgagaaagtcaaggcacttcgaggagaaattgcgcctctgaaagagaacgtgagccacgtcaatgaccttgctcgccagcttaccactttgggcattcagctctcaccgtataacctcagcactctggaagacctgaacaccagatggaagcttctgcaggtggccgtcgaggaccgagtcaggcagctgcatgaagcccacagggactttggtccagcatctcagcactttctttccacgtctgtccagggtccctgggagagagccatctcgccaaacaaagtgccctactatatcaaccacgagactcaaacaacttgctgggaccatcccaaaatgacagagctctaccagtctttagctgacctgaataatgtcagattctcagcttataggactgccatgaaactccgaagactgcagaaggccctttgcttggatctcttgagcctgtcagctgcatgtgatgccttggaccagcacaacctcaagcaaaatgaccagcccatggatatcctgcagattattaattgtttgaccactatttatgaccgcctggagcaagagcacaacaatttggtcaacgtccctctctgcgtggatatgtgtctgaactggctgctgaatgtttatgatacgggacgaacagggaggatccgtgtcctgtcttttaaaactggcatcatttccctgtgtaaagcacatttggaagacaagtacagataccttttcaagcaagtggcaagttcaacaggattttgtgaccagcgcaggctgggcctccttctgcatgattctatccaaattccaagacagttgggtgaagttgcatcctttgggggcagtaacattgagccaagtgtccggagctgcttccaatttgctaataataagccagagatcgaagcggccctcttcctagactggatgagactggaaccccagtccatggtgtggctgcccgtcctgcacagagtggctgctgcagaaactgccaagcatcaggccaaatgtaacatctgcaaagagtgtccaatcattggattcaggtacaggagtctaaagcactttaattatgacatctgccaaagctgctttttttctggtcgagttgcaaaaggccataaaatgcactatcccatggtggaatattgcactccgactacatcaggagaagatgttcgagactttgccaaggtactaaaaaacaaatttcgaaccaaaaggtattttgcgaagcatccccgaatgggctacctgccagtgcagactgtcttagagggggacaacatggaaactcccgttactctgatcaacttctggccagtagattctgcgcctgcctcgtcccctcagctttcacacgatgatactcattcacgcattgaacattatgctagcaggctagcagaaatggaaaacagcaatggatcttatctaaatgatagcatctctcctaatgagagcatagatgatgaacatttgttaatccagcattactgccaaagtttgaaccaggactcccccctgagccagcctcgtagt

SEQ ID NO: 138 - DNA, 3621 bp, synthetic construct
  source 1..3621: mol_type = other DNA
atggccaagtacggcgagcacgaggccagccccgacaacggccagaacgagttcagcgacatcatcaagagccggagcgacgagcacaacgacgtgcagaagaagaccttcaccaagtggatcaacgcccggttcagcaagagcggcaagccccccatcaacgacatgttcaccgacctgaaggacggccggaagctgctggacctgctggagggcctgaccggcaccagcctgcccaaggagcggggcagcacccgggtgcacgccctgaacaacgtgaaccgggtgctgcaggtgctgcaccagaacaacgtggagctggtgaacatcggcggcaccgacatcgtggacggcaaccacaagctgaccctgggcctgctgtggagcatcatcctgcactggcaggtgaaggacgtgatgaaggacgtgatgagcgacctgcagcagaccaacagcgagaagatcctgctgagctgggtgcggcagaccacccggccctacagccaggtgaacgtgctgaacttcaccaccagctggaccgacggcctggccttcaacgccgtgctgcaccggcacaagcccgacctgttcagctgggacaaggtggtgaagatgagccccatcgagcggctggagcacgccttcagcaaggcccagacctacctgggcatcgagaagctgctggaccccgaggacgtggccgtgcagctgcccgacaagaagagcatcatcatgtacctgaccagcctgttcgaggtgctgccccagcaggtgaccatcgacgccatccgggaggtggagaccctgccccggaagtacaagaaggagtgcgaggaggaggccatcaacatccagagcaccgcccccgaggaggagcacgagagcccccgggccgagacccccagcaccgtgaccgaggtggacatggacctggacagctaccagatcgccctggaggaggtgctgacctggctgctgagcgccgaggacaccttccaggagcaggacgacatcagcgacgacgtggaggaggtgaaggaccagttcgccacccacgaggccttcatgatggagctgaccgcccaccagagcagcgtgggcagcgtgctgcaggccggcaaccagctgatcacccagggcaccctgagcgacgaggaggagttcgagatccaggagcagatgaccctgctgaacgcccggtgggaggccctgcgggtggagagcatggaccggcagagccggctgcacgacgtgctgatggagctgcagaagaagcagctgcagcagctgagcgcctggctgaccctgaccgaggagcggatccagaagatggagacctgccccctggacgacgacgtgaagagcctgcagaagctgctggaggagcacaagagcctgcagagcgacctggaggccgagcaggtgaaggtgaacagcctgacccacatggtggtgatcgtggacgagaacagcggcgagagcgccaccgccatcctggaggaccagctgcagaagctgggcgagcggtggaccgccgtgtgccggtggaccgaggagcggtggaaccggctgcaggagatcaacatcctgtggcaggagctgctggaggagcagtgcctgctgaaggcctggctgaccgagaaggaggaggccctgaacaaggtgcagaccagcaacttcaaggaccagaaggagctgagcgtgagcgtgcggcggctggccatcctgaaggaggacatggagatgaagcggcagaccctggaccagctgagcgagatcggccaggacgtgggccagctgctggacaacagcaaggccagcaagaagatcaacagcgacagcgaggagctgacccagcggtgggacagcctggtgcagcggctggaggacagcagcaaccaggtgacccaggccgccgctagcgcccagagaaaaatagatgagacccttgaaagactccgggaacttcaagaggccacggatgagctggacctcaagctgcgccaagctgaggtgatcaagggatcctggcagcccgtgggcgatctcctcattgactctctccaagatcacctcgagaaagtcaaggcacttcgaggagaaattgcgcctctgaaagagaacgtgagccacgtcaatgaccttgctcgccagcttaccactttgggcattcagctctcaccgtataacctcagcactctggaagacctgaacaccagatggaagcttctgcaggtggccgtcgaggaccgagtcaggcagctgcatgaagcccacagggactttggtccagcatctcagcactttctttccacgtctgtccagggtccctgggagagagccatctcgccaaacaaagtgccctactatatcaaccacgagactcaaacaacttgctgggaccatcccaaaatgacagagctctaccagtctttagctgacctgaataatgtcagattctcagcttataggactgccatgaaactccgaagactgcagaaggccctttgcttggatctcttgagcctgtcagctgcatgtgatgccttggaccagcacaacctcaagcaaaatgaccagcccatggatatcctgcagattattaattgtttgaccactatttatgaccgcctggagcaagagcacaacaatttggtcaacgtccctctctgcgtggatatgtgtctgaactggctgctgaatgtttatgatacgggacgaacagggaggatccgtgtcctgtcttttaaaactggcatcatttccctgtgtaaagcacatttggaagacaagtacagataccttttcaagcaagtggcaagttcaacaggattttgtgaccagcgcaggctgggcctccttctgcatgattctatccaaattccaagacagttgggtgaagttgcatcctttgggggcagtaacattgagccaagtgtccggagctgcttccaatttgctaataataagccagagatcgaagcggccctcttcctagactggatgagactggaaccccagtccatggtgtggctgcccgtcctgcacagagtggctgctgcagaaactgccaagcatcaggccaaatgtaacatctgcaaagagtgtccaatcattggattcaggtacaggagtctaaagcactttaattatgacatctgccaaagctgctttttttctggtcgagttgcaaaaggccataaaatgcactatcccatggtggaatattgcactccgactacatcaggagaagatgttcgagactttgccaaggtactaaaaaacaaatttcgaaccaaaaggtattttgcgaagcatccccgaatgggctacctgccagtgcagactgtcttagagggggacaacatggaaactcccgttactctgatcaacttctggccagtagattctgcgcctgcctcgtcccctcagctttcacacgatgatactcattcacgcattgaacattatgctagcaggctagcagaaatggaaaacagcaatggatcttatctaaatgatagcatctctcctaatgagagcatagatgatgaacatttgttaatccagcattactgccaaagtttgaaccaggactcccccctgagccagcctcgtagt

SEQ ID NO: 139 - DNA, 3810 bp, Homo sapiens
  source 1..3810: mol_type = genomic DNA
atggccaagtatggagaacatgaagccagtcctgacaatgggcagaacgaattcagtgatatcattaagtccagatctgatgaacacaatgacgtacagaagaaaacctttaccaaatggataaatgctcgattttcaaagagtgggaaaccacccatcaatgatatgttcacagacctcaaagatggaaggaagctattggatcttctagaaggcctcacaggaacatcactgccaaaggaacgtggttccacaagggtacatgccttaaataacgtcaacagagtgctgcaggttttacatcagaacaatgtggaattagtgaatatagggggaactgacattgtggatggaaatcacaaactgactttggggttactttggagcatcattttgcactggcaggtgaaagatgtcatgaaggatgtcatgtcggacctgcagcagacgaacagtgagaagatcctgctcagctgggtgcgtcagaccaccaggccctacagccaagtcaacgtcctcaacttcaccaccagctggacagatggactcgcctttaatgctgtcctccaccgacataaacctgatctcttcagctgggataaagttgtcaaaatgtcaccaattgagagacttgaacatgccttcagcaaggctcaaacttatttgggaattgaaaagctgttagatcctgaagatgttgccgttcagcttcctgacaagaaatccataattatgtatttaacatctttgtttgaggtgctacctcagcaagtcaccatagacgccatccgtgaggtagagacactcccaaggaaatataaaaaagaatgtgaagaagaggcaattaatatacagagtacagcgcctgaggaggagcatgagagtccccgagctgaaactcccagcactgtcactgaggttgacatggatctggacagctatcagattgcgttggaggaagtgctgacctggttgctttctgctgaggacactttccaggagcaggatgatatttctgatgatgttgaagaagtcaaagaccagtttgcaacccatgaagcttttatgatggaactgactgcacaccagagcagtgtgggcagcgtcctgcaggcaggcaaccaactgataacacaaggaactctgtcagacgaagaagaatttgagattcaggaacagatgaccctgctgaatgctagatgggaggctcttagggtggagagtatggacagacagtcccggctgcacgatgtgctgatggaactgcagaagaagcaactgcagcagctctccgcctggttaacactcacagaggagcgcattcagaagatggaaacttgccccctggatgatgatgtaaaatctctacaaaagctgctagaagaacataaaagtttgcaaagtgatcttgaggctgaacaggtgaaagtaaattcactaactcacatggtggtcattgttgatgaaaacagtggtgagagtgctacagctatcctagaagaccagttacagaaacttggtgagcgctggacagcagtatgccgttggactgaagaacgctggaataggttacaagaaatcaatatattgtggcaggaattattggaagaacagtgcttgttgaaagcttggttaaccgaaaaagaagaggctttaaataaagtccagacaagcaacttcaaagaccaaaaggaactaagtgtcagtgttcgacgtctggctattttgaaggaagacatggaaatgaagcgtcaaacattggatcagctgagtgagattggccaggatgtgggacaattacttgataattccaaggcatctaagaagatcaacagtgactcagaggaactgactcaaagatgggattctttggttcagagactagaagattcctccaaccaggtgactcaggctgccgctagcgcccagagaaaaatagatgagacccttgaaagactccgggaacttcaagaggccacggatgagctggacctcaagctgcgccaagctgaggtgatcaagggatcctggcagcccgtgggcgatctcctcattgactctctccaagatcacctcgagaaagtcaaggcacttcgaggagaaattgcgcctctgaaagagaacgtgagccacgtcaatgaccttgctcgccagcttaccactttgggcattcagctctcaccgtataacctcagcactctggaagacctgaacaccagatggaagcttctgcaggtggccgtcgaggaccgagtcaggcagctgcatgaagcccacagggactttggtccagcatctcagcactttctttccacgtctgtccagggtccctgggagagagccatctcgccaaacaaagtgccctactatatcaaccacgagactcaaacaacttgctgggaccatcccaaaatgacagagctctaccagtctttagctgacctgaataatgtcagattctcagcttataggactgccatgaaactccgaagactgcagaaggccctttgcttggatctcttgagcctgtcagctgcatgtgatgccttggaccagcacaacctcaagcaaaatgaccagcccatggatatcctgcagattattaattgtttgaccactatttatgaccgcctggagcaagagcacaacaatttggtcaacgtccctctctgcgtggatatgtgtctgaactggctgctgaatgtttatgatacgggacgaacagggaggatccgtgtcctgtcttttaaaactggcatcatttccctgtgtaaagcacatttggaagacaagtacagataccttttcaagcaagtggcaagttcaacaggattttgtgaccagcgcaggctgggcctccttctgcatgattctatccaaattccaagacagttgggtgaagttgcatcctttgggggcagtaacattgagccaagtgtccggagctgcttccaatttgctaataataagccagagatcgaagcggccctcttcctagactggatgagactggaaccccagtccatggtgtggctgcccgtcctgcacagagtggctgctgcagaaactgccaagcatcaggccaaatgtaacatctgcaaagagtgtccaatcattggattcaggtacaggagtctaaagcactttaattatgacatctgccaaagctgctttttttctggtcgagttgcaaaaggccataaaatgcactatcccatggtggaatattgcactccgactacatcaggagaagatgttcgagactttgccaaggtactaaaaaacaaatttcgaaccaaaaggtattttgcgaagcatccccgaatgggctacctgccagtgcagactgtcttagagggggacaacatggaaactcccgttactctgatcaacttctggccagtagattctgcgcctgcctcgtcccctcagctttcacacgatgatactcattcacgcattgaacattatgctagcaggctagcagaaatggaaaacagcaatggatcttatctaaatgatagcatctctcctaatgagagcatagatgatgaacatttgttaatccagcattactgccaaagtttgaaccaggactcccccctgagccagcctcgtagtcctgcccagatcttgatttccttagagagtgaggaaagaggggagctagagagaatcctagcagatcttgaggaagaaaacaggaatctgcaagcagaatatgaccgtctaaagcagcagcacgaacataaaggcctgtccccactgccgtcccctcctgaaatgatgcccacctctccccagagtccc

SEQ ID NO: 140 - DNA, 3810 bp, synthetic construct
  source 1..3810: mol_type = other DNA
atggccaagtacggcgagcacgaggccagccccgacaacggccagaacgagttcagcgacatcatcaagagccggagcgacgagcacaacgacgtgcagaagaagaccttcaccaagtggatcaacgcccggttcagcaagagcggcaagccccccatcaacgacatgttcaccgacctgaaggacggccggaagctgctggacctgctggagggcctgaccggcaccagcctgcccaaggagcggggcagcacccgggtgcacgccctgaacaacgtgaaccgggtgctgcaggtgctgcaccagaacaacgtggagctggtgaacatcggcggcaccgacatcgtggacggcaaccacaagctgaccctgggcctgctgtggagcatcatcctgcactggcaggtgaaggacgtgatgaaggacgtgatgagcgacctgcagcagaccaacagcgagaagatcctgctgagctgggtgcggcagaccacccggccctacagccaggtgaacgtgctgaacttcaccaccagctggaccgacggcctggccttcaacgccgtgctgcaccggcacaagcccgacctgttcagctgggacaaggtggtgaagatgagccccatcgagcggctggagcacgccttcagcaaggcccagacctacctgggcatcgagaagctgctggaccccgaggacgtggccgtgcagctgcccgacaagaagagcatcatcatgtacctgaccagcctgttcgaggtgctgccccagcaggtgaccatcgacgccatccgggaggtggagaccctgccccggaagtacaagaaggagtgcgaggaggaggccatcaacatccagagcaccgcccccgaggaggagcacgagagcccccgggccgagacccccagcaccgtgaccgaggtggacatggacctggacagctaccagatcgccctggaggaggtgctgacctggctgctgagcgccgaggacaccttccaggagcaggacgacatcagcgacgacgtggaggaggtgaaggaccagttcgccacccacgaggccttcatgatggagctgaccgcccaccagagcagcgtgggcagcgtgctgcaggccggcaaccagctgatcacccagggcaccctgagcgacgaggaggagttcgagatccaggagcagatgaccctgctgaacgcccggtgggaggccctgcgggtggagagcatggaccggcagagccggctgcacgacgtgctgatggagctgcagaagaagcagctgcagcagctgagcgcctggctgaccctgaccgaggagcggatccagaagatggagacctgccccctggacgacgacgtgaagagcctgcagaagctgctggaggagcacaagagcctgcagagcgacctggaggccgagcaggtgaaggtgaacagcctgacccacatggtggtgatcgtggacgagaacagcggcgagagcgccaccgccatcctggaggaccagctgcagaagctgggcgagcggtggaccgccgtgtgccggtggaccgaggagcggtggaaccggctgcaggagatcaacatcctgtggcaggagctgctggaggagcagtgcctgctgaaggcctggctgaccgagaaggaggaggccctgaacaaggtgcagaccagcaacttcaaggaccagaaggagctgagcgtgagcgtgcggcggctggccatcctgaaggaggacatggagatgaagcggcagaccctggaccagctgagcgagatcggccaggacgtgggccagctgctggacaacagcaaggccagcaagaagatcaacagcgacagcgaggagctgacccagcggtgggacagcctggtgcagcggctggaggacagcagcaaccaggtgacccaggccgccgctagcgcccagagaaaaatagatgagacccttgaaagactccgggaacttcaagaggccacggatgagctggacctcaagctgcgccaagctgaggtgatcaagggatcctggcagcccgtgggcgatctcctcattgactctctccaagatcacctcgagaaagtcaaggcacttcgaggagaaattgcgcctctgaaagagaacgtgagccacgtcaatgaccttgctcgccagcttaccactttgggcattcagctctcaccgtataacctcagcactctggaagacctgaacaccagatggaagcttctgcaggtggccgtcgaggaccgagtcaggcagctgcatgaagcccacagggactttggtccagcatctcagcactttctttccacgtctgtccagggtccctgggagagagccatctcgccaaacaaagtgccctactatatcaaccacgagactcaaacaacttgctgggaccatcccaaaatgacagagctctaccagtctttagctgacctgaataatgtcagattctcagcttataggactgccatgaaactccgaagactgcagaaggccctttgcttggatctcttgagcctgtcagctgcatgtgatgccttggaccagcacaacctcaagcaaaatgaccagcccatggatatcctgcagattattaattgtttgaccactatttatgaccgcctggagcaagagcacaacaatttggtcaacgtccctctctgcgtggatatgtgtctgaactggctgctgaatgtttatgatacgggacgaacagggaggatccgtgtcctgtcttttaaaactggcatcatttccctgtgtaaagcacatttggaagacaagtacagataccttttcaagcaagtggcaagttcaacaggattttgtgaccagcgcaggctgggcctccttctgcatgattctatccaaattccaagacagttgggtgaagttgcatcctttgggggcagtaacattgagccaagtgtccggagctgcttccaatttgctaataataagccagagatcgaagcggccctcttcctagactggatgagactggaaccccagtccatggtgtggctgcccgtcctgcacagagtggctgctgcagaaactgccaagcatcaggccaaatgtaacatctgcaaagagtgtccaatcattggattcaggtacaggagtctaaagcactttaattatgacatctgccaaagctgctttttttctggtcgagttgcaaaaggccataaaatgcactatcccatggtggaatattgcactccgactacatcaggagaagatgttcgagactttgccaaggtactaaaaaacaaatttcgaaccaaaaggtattttgcgaagcatccccgaatgggctacctgccagtgcagactgtcttagagggggacaacatggaaactcccgttactctgatcaacttctggccagtagattctgcgcctgcctcgtcccctcagctttcacacgatgatactcattcacgcattgaacattatgctagcaggctagcagaaatggaaaacagcaatggatcttatctaaatgatagcatctctcctaatgagagcatagatgatgaacatttgttaatccagcattactgccaaagtttgaaccaggactcccccctgagccagcctcgtagtcctgcccagatcttgatttccttagagagtgaggaaagaggggagctagagagaatcctagcagatcttgaggaagaaaacaggaatctgcaagcagaatatgaccgtctaaagcagcagcacgaacataaaggcctgtccccactgccgtcccctcctgaaatgatgcccacctctccccagagtccc

SEQ ID NO: 141 - DNA, 3717 bp, Homo sapiens
  source 1..3717: mol_type = genomic DNA
atggccaagtatggagaacatgaagccagtcctgacaatgggcagaacgaattcagtgatatcattaagtccagatctgatgaacacaatgacgtacagaagaaaacctttaccaaatggataaatgctcgattttcaaagagtgggaaaccacccatcaatgatatgttcacagacctcaaagatggaaggaagctattggatcttctagaaggcctcacaggaacatcactgccaaaggaacgtggttccacaagggtacatgccttaaataacgtcaacagagtgctgcaggttttacatcagaacaatgtggaattagtgaatatagggggaactgacattgtggatggaaatcacaaactgactttggggttactttggagcatcattttgcactggcaggtgaaagatgtcatgaaggatgtcatgtcggacctgcagcagacgaacagtgagaagatcctgctcagctgggtgcgtcagaccaccaggccctacagccaagtcaacgtcctcaacttcaccaccagctggacagatggactcgcctttaatgctgtcctccaccgacataaacctgatctcttcagctgggataaagttgtcaaaatgtcaccaattgagagacttgaacatgccttcagcaaggctcaaacttatttgggaattgaaaagctgttagatcctgaagatgttgccgttcagcttcctgacaagaaatccataattatgtatttaacatctttgtttgaggtgctacctcagcaagtcaccatagacgccatccgtgaggtagagacactcccaaggaaatataaaaaagaatgtgaagaagaggcaattaatatacagagtacagcgcctgaggaggagcatgagagtccccgagctgaaactcccagcactgtcactgaggttgacatggatctggacagctatcagattgcgttggaggaagtgctgacctggttgctttctgctgaggacactttccaggagcaggatgatatttctgatgatgttgaagaagtcaaagaccagtttgcaacccatgaagcttttatgatggaactgactgcacaccagagcagtgtgggcagcgtcctgcaggcaggcaaccaactgataacacaaggaactctgtcagacgaagaagaatttgagattcaggaacagatgaccctgctgaatgctagatgggaggctcttagggtggagagtatggacagacagtcccggctgcacgatgtgctgatggaactgcagaagaagcaactgcagcagctctccgcctggttaacactcacagaggagcgcattcagaagatggaaacttgccccctggatgatgatgtaaaatctctacaaaagctgctagaagaacataaaagtttgcaaagtgatcttgaggctgaacaggtgaaagtaaattcactaactcacatggtggtcattgttgatgaaaacagtggtgagagtgctacagctatcctagaagaccagttacagaaacttggtgagcgctggacagcagtatgccgttggactgaagaacgctggaataggttacaagaaatcaatatattgtggcaggaattattggaagaacagtgcttgttgaaagcttggttaaccgaaaaagaagaggctttaaataaagtccagacaagcaacttcaaagaccaaaaggaactaagtgtcagtgttcgacgtctggctattttgaaggaagacatggaaatgaagcgtcaaacattggatcagctgagtgagattggccaggatgtgggacaattacttgataattccaaggcatctaagaagatcaacagtgactcagaggaactgactcaaagatgggattctttggttcagagactagaagattcctccaaccaggtgactcaggctgtagcaaagctggggatgtctcagattcctcagaaggaccttttggagactgttcgtgtaagagaacaagcaattacaaaaaaatctaagcaggaagccgctagcgcccagagaaaaatagatgagacccttgaaagactccgggaacttcaagaggccacggatgagctggacctcaagctgcgccaagctgaggtgatcaagggatcctggcagcccgtgggcgatctcctcattgactctctccaagatcacctcgagaaagtcaaggcacttcgaggagaaattgcgcctctgaaagagaacgtgagccacgtcaatgaccttgctcgccagcttaccactttgggcattcagctctcaccgtataacctcagcactctggaagacctgaacaccagatggaagcttctgcaggtggccgtcgaggaccgagtcaggcagctgcatgaagcccacagggactttggtccagcatctcagcactttctttccacgtctgtccagggtccctgggagagagccatctcgccaaacaaagtgccctactatatcaaccacgagactcaaacaacttgctgggaccatcccaaaatgacagagctctaccagtctttagctgacctgaataatgtcagattctcagcttataggactgccatgaaactccgaagactgcagaaggccctttgcttggatctcttgagcctgtcagctgcatgtgatgccttggaccagcacaacctcaagcaaaatgaccagcccatggatatcctgcagattattaattgtttgaccactatttatgaccgcctggagcaagagcacaacaatttggtcaacgtccctctctgcgtggatatgtgtctgaactggctgctgaatgtttatgatacgggacgaacagggaggatccgtgtcctgtcttttaaaactggcatcatttccctgtgtaaagcacatttggaagacaagtacagataccttttcaagcaagtggcaagttcaacaggattttgtgaccagcgcaggctgggcctccttctgcatgattctatccaaattccaagacagttgggtgaagttgcatcctttgggggcagtaacattgagccaagtgtccggagctgcttccaatttgctaataataagccagagatcgaagcggccctcttcctagactggatgagactggaaccccagtccatggtgtggctgcccgtcctgcacagagtggctgctgcagaaactgccaagcatcaggccaaatgtaacatctgcaaagagtgtccaatcattggattcaggtacaggagtctaaagcactttaattatgacatctgccaaagctgctttttttctggtcgagttgcaaaaggccataaaatgcactatcccatggtggaatattgcactccgactacatcaggagaagatgttcgagactttgccaaggtactaaaaaacaaatttcgaaccaaaaggtattttgcgaagcatccccgaatgggctacctgccagtgcagactgtcttagagggggacaacatggaaactcccgttactctgatcaacttctggccagtagattctgcgcctgcctcgtcccctcagctttcacacgatgatactcattcacgcattgaacattatgctagcaggctagcagaaatggaaaacagcaatggatcttatctaaatgatagcatctctcctaatgagagcatagatgatgaacatttgttaatccagcattactgccaaagtttgaaccaggactcccccctgagccagcctcgtagt

SEQ ID NO: 142 - DNA, 3717 bp, synthetic construct
  source 1..3717: mol_type = other DNA
atggccaagtacggcgagcacgaggccagccccgacaacggccagaacgagttcagcgacatcatcaagagccggagcgacgagcacaacgacgtgcagaagaagaccttcaccaagtggatcaacgcccggttcagcaagagcggcaagccccccatcaacgacatgttcaccgacctgaaggacggccggaagctgctggacctgctggagggcctgaccggcaccagcctgcccaaggagcggggcagcacccgggtgcacgccctgaacaacgtgaaccgggtgctgcaggtgctgcaccagaacaacgtggagctggtgaacatcggcggcaccgacatcgtggacggcaaccacaagctgaccctgggcctgctgtggagcatcatcctgcactggcaggtgaaggacgtgatgaaggacgtgatgagcgacctgcagcagaccaacagcgagaagatcctgctgagctgggtgcggcagaccacccggccctacagccaggtgaacgtgctgaacttcaccaccagctggaccgacggcctggccttcaacgccgtgctgcaccggcacaagcccgacctgttcagctgggacaaggtggtgaagatgagccccatcgagcggctggagcacgccttcagcaaggcccagacctacctgggcatcgagaagctgctggaccccgaggacgtggccgtgcagctgcccgacaagaagagcatcatcatgtacctgaccagcctgttcgaggtgctgccccagcaggtgaccatcgacgccatccgggaggtggagaccctgccccggaagtacaagaaggagtgcgaggaggaggccatcaacatccagagcaccgcccccgaggaggagcacgagagcccccgggccgagacccccagcaccgtgaccgaggtggacatggacctggacagctaccagatcgccctggaggaggtgctgacctggctgctgagcgccgaggacaccttccaggagcaggacgacatcagcgacgacgtggaggaggtgaaggaccagttcgccacccacgaggccttcatgatggagctgaccgcccaccagagcagcgtgggcagcgtgctgcaggccggcaaccagctgatcacccagggcaccctgagcgacgaggaggagttcgagatccaggagcagatgaccctgctgaacgcccggtgggaggccctgcgggtggagagcatggaccggcagagccggctgcacgacgtgctgatggagctgcagaagaagcagctgcagcagctgagcgcctggctgaccctgaccgaggagcggatccagaagatggagacctgccccctggacgacgacgtgaagagcctgcagaagctgctggaggagcacaagagcctgcagagcgacctggaggccgagcaggtgaaggtgaacagcctgacccacatggtggtgatcgtggacgagaacagcggcgagagcgccaccgccatcctggaggaccagctgcagaagctgggcgagcggtggaccgccgtgtgccggtggaccgaggagcggtggaaccggctgcaggagatcaacatcctgtggcaggagctgctggaggagcagtgcctgctgaaggcctggctgaccgagaaggaggaggccctgaacaaggtgcagaccagcaacttcaaggaccagaaggagctgagcgtgagcgtgcggcggctggccatcctgaaggaggacatggagatgaagcggcagaccctggaccagctgagcgagatcggccaggacgtgggccagctgctggacaacagcaaggccagcaagaagatcaacagcgacagcgaggagctgacccagcggtgggacagcctggtgcagcggctggaggacagcagcaaccaggtgacccaggccgtggccaagctgggcatgagccagatcccccagaaggacctgctggagaccgtgcgggtgcgggagcaggccatcaccaagaagagcaagcaggaggccgctagcgcccagagaaaaatagatgagacccttgaaagactccgggaacttcaagaggccacggatgagctggacctcaagctgcgccaagctgaggtgatcaagggatcctggcagcccgtgggcgatctcctcattgactctctccaagatcacctcgagaaagtcaaggcacttcgaggagaaattgcgcctctgaaagagaacgtgagccacgtcaatgaccttgctcgccagcttaccactttgggcattcagctctcaccgtataacctcagcactctggaagacctgaacaccagatggaagcttctgcaggtggccgtcgaggaccgagtcaggcagctgcatgaagcccacagggactttggtccagcatctcagcactttctttccacgtctgtccagggtccctgggagagagccatctcgccaaacaaagtgccctactatatcaaccacgagactcaaacaacttgctgggaccatcccaaaatgacagagctctaccagtctttagctgacctgaataatgtcagattctcagcttataggactgccatgaaactccgaagactgcagaaggccctttgcttggatctcttgagcctgtcagctgcatgtgatgccttggaccagcacaacctcaagcaaaatgaccagcccatggatatcctgcagattattaattgtttgaccactatttatgaccgcctggagcaagagcacaacaatttggtcaacgtccctctctgcgtggatatgtgtctgaactggctgctgaatgtttatgatacgggacgaacagggaggatccgtgtcctgtcttttaaaactggcatcatttccctgtgtaaagcacatttggaagacaagtacagataccttttcaagcaagtggcaagttcaacaggattttgtgaccagcgcaggctgggcctccttctgcatgattctatccaaattccaagacagttgggtgaagttgcatcctttgggggcagtaacattgagccaagtgtccggagctgcttccaatttgctaataataagccagagatcgaagcggccctcttcctagactggatgagactggaaccccagtccatggtgtggctgcccgtcctgcacagagtggctgctgcagaaactgccaagcatcaggccaaatgtaacatctgcaaagagtgtccaatcattggattcaggtacaggagtctaaagcactttaattatgacatctgccaaagctgctttttttctggtcgagttgcaaaaggccataaaatgcactatcccatggtggaatattgcactccgactacatcaggagaagatgttcgagactttgccaaggtactaaaaaacaaatttcgaaccaaaaggtattttgcgaagcatccccgaatgggctacctgccagtgcagactgtcttagagggggacaacatggaaactcccgttactctgatcaacttctggccagtagattctgcgcctgcctcgtcccctcagctttcacacgatgatactcattcacgcattgaacattatgctagcaggctagcagaaatggaaaacagcaatggatcttatctaaatgatagcatctctcctaatgagagcatagatgatgaacatttgttaatccagcattactgccaaagtttgaaccaggactcccccctgagccagcctcgtagt

SEQ ID NO: 143 - DNA, 4302 bp, Homo sapiens
  source 1..4302: mol_type = genomic DNA
atggccaagtatggagaacatgaagccagtcctgacaatgggcagaacgaattcagtgatatcattaagtccagatctgatgaacacaatgacgtacagaagaaaacctttaccaaatggataaatgctcgattttcaaagagtgggaaaccacccatcaatgatatgttcacagacctcaaagatggaaggaagctattggatcttctagaaggcctcacaggaacatcactgccaaaggaacgtggttccacaagggtacatgccttaaataacgtcaacagagtgctgcaggttttacatcagaacaatgtggaattagtgaatatagggggaactgacattgtggatggaaatcacaaactgactttggggttactttggagcatcattttgcactggcaggtgaaagatgtcatgaaggatgtcatgtcggacctgcagcagacgaacagtgagaagatcctgctcagctgggtgcgtcagaccaccaggccctacagccaagtcaacgtcctcaacttcaccaccagctggacagatggactcgcctttaatgctgtcctccaccgacataaacctgatctcttcagctgggataaagttgtcaaaatgtcaccaattgagagacttgaacatgccttcagcaaggctcaaacttatttgggaattgaaaagctgttagatcctgaagatgttgccgttcagcttcctgacaagaaatccataattatgtatttaacatctttgtttgaggtgctacctcagcaagtcaccatagacgccatccgtgaggtagagacactcccaaggaaatataaaaaagaatgtgaagaagaggcaattaatatacagagtacagcgcctgaggaggagcatgagagtccccgagctgaaactcccagcactgtcactgaggttgacatggatctggacagctatcagattgcgttggaggaagtgctgacctggttgctttctgctgaggacactttccaggagcaggatgatatttctgatgatgttgaagaagtcaaagaccagtttgcaacccatgaagcttttatgatggaactgactgcacaccagagcagtgtgggcagcgtcctgcaggcaggcaaccaactgataacacaaggaactctgtcagacgaagaagaatttgagattcaggaacagatgaccctgctgaatgctagatgggaggctcttagggtggagagtatggacagacagtcccggctgcacgatgtgctgatggaactgcagaagaagcaactgcagcagctctccgcctggttaacactcacagaggagcgcattcagaagatggaaacttgccccctggatgatgatgtaaaatctctacaaaagctgctagaagaacataaaagtttgcaaagtgatcttgaggctgaacaggtgaaagtaaattcactaactcacatggtggtcattgttgatgaaaacagtggtgagagtgctacagctatcctagaagaccagttacagaaacttggtgagcgctggacagcagtatgccgttggactgaagaacgctggaataggttacaagaaatcaatatattgtggcaggaattattggaagaacagtgcttgttgaaagcttggttaaccgaaaaagaagaggctttaaataaagtccagacaagcaacttcaaagaccaaaaggaactaagtgtcagtgttcgacgtctggctattttgaaggaagacatggaaatgaagcgtcaaacattggatcagctgagtgagattggccaggatgtgggacaattacttgataattccaaggcatctaagaagatcaacagtgactcagaggaactgactcaaagatgggattctttggttcagagactagaagattcctccaaccaggtgactcaggctgtagcaaagctggggatgtctcagattcctcagaaggaccttttggagactgttcgtgtaagagaacaagcaattacaaaaaaatctaagcaggaagccgctagcgcccagagaaaaatagatgagacccttgaaagactccgggaacttcaagaggccacggatgagctggacctcaagctgcgccaagctgaggtgatcaagggatcctggcagcccgtgggcgatctcctcattgactctctccaagatcacctcgagaaagtcaaggcacttcgaggagaaattgcgcctctgaaagagaacgtgagccacgtcaatgaccttgctcgccagcttaccactttgggcattcagctctcaccgtataacctcagcactctggaagacctgaacaccagatggaagcttctgcaggtggccgtcgaggaccgagtcaggcagctgcatgaagcccacagggactttggtccagcatctcagcactttctttccacgtctgtccagggtccctgggagagagccatctcgccaaacaaagtgccctactatatcaaccacgagactcaaacaacttgctgggaccatcccaaaatgacagagctctaccagtctttagctgacctgaataatgtcagattctcagcttataggactgccatgaaactccgaagactgcagaaggccctttgcttggatctcttgagcctgtcagctgcatgtgatgccttggaccagcacaacctcaagcaaaatgaccagcccatggatatcctgcagattattaattgtttgaccactatttatgaccgcctggagcaagagcacaacaatttggtcaacgtccctctctgcgtggatatgtgtctgaactggctgctgaatgtttatgatacgggacgaacagggaggatccgtgtcctgtcttttaaaactggcatcatttccctgtgtaaagcacatttggaagacaagtacagataccttttcaagcaagtggcaagttcaacaggattttgtgaccagcgcaggctgggcctccttctgcatgattctatccaaattccaagacagttgggtgaagttgcatcctttgggggcagtaacattgagccaagtgtccggagctgcttccaatttgctaataataagccagagatcgaagcggccctcttcctagactggatgagactggaaccccagtccatggtgtggctgcccgtcctgcacagagtggctgctgcagaaactgccaagcatcaggccaaatgtaacatctgcaaagagtgtccaatcattggattcaggtacaggagtctaaagcactttaattatgacatctgccaaagctgctttttttctggtcgagttgcaaaaggccataaaatgcactatcccatggtggaatattgcactccgactacatcaggagaagatgttcgagactttgccaaggtactaaaaaacaaatttcgaaccaaaaggtattttgcgaagcatccccgaatgggctacctgccagtgcagactgtcttagagggggacaacatggaaactcccgttactctgatcaacttctggccagtagattctgcgcctgcctcgtcccctcagctttcacacgatgatactcattcacgcattgaacattatgctagcaggctagcagaaatggaaaacagcaatggatcttatctaaatgatagcatctctcctaatgagagcatagatgatgaacatttgttaatccagcattactgccaaagtttgaaccaggactcccccctgagccagcctcgtagtcctgcccagatcttgatttccttagagagtgaggaaagaggggagctagagagaatcctagcagatcttgaggaagaaaacaggaatctgcaagcagaatatgaccgtctaaagcagcagcacgaacataaaggcctgtccccactgccgtcccctcctgaaatgatgcccacctctccccagagtccccgggatgctgagctcattgctgaggccaagctactgcgtcaacacaaaggccgcctggaagccaggatgcaaatcctggaagaccacaataaacagctggagtcacagttacacaggctaaggcagctgctggagcaaccccaggcagaggccaaagtgaatggcacaacggtgtcctctccttctacctctctacagaggtccgacagcagtcagcctatgctgctccgagtggttggcagtcaaacttcggactccatgggtgaggaagatcttctcagtcctccccaggacacaagcacagggttagaggaggtgatggagcaactcaacaactccttccctagttcaagaggaagaaatacccctggaaagccaatgagagaggacacaatg

SEQ ID NO: 144 - DNA, 4302 bp, synthetic construct
  source 1..4302: mol_type = other DNA
atggccaagtacggcgagcacgaggccagccccgacaacggccagaacgagttcagcgacatcatcaagagccggagcgacgagcacaacgacgtgcagaagaagaccttcaccaagtggatcaacgcccggttcagcaagagcggcaagccccccatcaacgacatgttcaccgacctgaaggacggccggaagctgctggacctgctggagggcctgaccggcaccagcctgcccaaggagcggggcagcacccgggtgcacgccctgaacaacgtgaaccgggtgctgcaggtgctgcaccagaacaacgtggagctggtgaacatcggcggcaccgacatcgtggacggcaaccacaagctgaccctgggcctgctgtggagcatcatcctgcactggcaggtgaaggacgtgatgaaggacgtgatgagcgacctgcagcagaccaacagcgagaagatcctgctgagctgggtgcggcagaccacccggccctacagccaggtgaacgtgctgaacttcaccaccagctggaccgacggcctggccttcaacgccgtgctgcaccggcacaagcccgacctgttcagctgggacaaggtggtgaagatgagccccatcgagcggctggagcacgccttcagcaaggcccagacctacctgggcatcgagaagctgctggaccccgaggacgtggccgtgcagctgcccgacaagaagagcatcatcatgtacctgaccagcctgttcgaggtgctgccccagcaggtgaccatcgacgccatccgggaggtggagaccctgccccggaagtacaagaaggagtgcgaggaggaggccatcaacatccagagcaccgcccccgaggaggagcacgagagcccccgggccgagacccccagcaccgtgaccgaggtggacatggacctggacagctaccagatcgccctggaggaggtgctgacctggctgctgagcgccgaggacaccttccaggagcaggacgacatcagcgacgacgtggaggaggtgaaggaccagttcgccacccacgaggccttcatgatggagctgaccgcccaccagagcagcgtgggcagcgtgctgcaggccggcaaccagctgatcacccagggcaccctgagcgacgaggaggagttcgagatccaggagcagatgaccctgctgaacgcccggtgggaggccctgcgggtggagagcatggaccggcagagccggctgcacgacgtgctgatggagctgcagaagaagcagctgcagcagctgagcgcctggctgaccctgaccgaggagcggatccagaagatggagacctgccccctggacgacgacgtgaagagcctgcagaagctgctggaggagcacaagagcctgcagagcgacctggaggccgagcaggtgaaggtgaacagcctgacccacatggtggtgatcgtggacgagaacagcggcgagagcgccaccgccatcctggaggaccagctgcagaagctgggcgagcggtggaccgccgtgtgccggtggaccgaggagcggtggaaccggctgcaggagatcaacatcctgtggcaggagctgctggaggagcagtgcctgctgaaggcctggctgaccgagaaggaggaggccctgaacaaggtgcagaccagcaacttcaaggaccagaaggagctgagcgtgagcgtgcggcggctggccatcctgaaggaggacatggagatgaagcggcagaccctggaccagctgagcgagatcggccaggacgtgggccagctgctggacaacagcaaggccagcaagaagatcaacagcgacagcgaggagctgacccagcggtgggacagcctggtgcagcggctggaggacagcagcaaccaggtgacccaggccgtggccaagctgggcatgagccagatcccccagaaggacctgctggagaccgtgcgggtgcgggagcaggccatcaccaagaagagcaagcaggaggccgctagcgcccagagaaaaatagatgagacccttgaaagactccgggaacttcaagaggccacggatgagctggacctcaagctgcgccaagctgaggtgatcaagggatcctggcagcccgtgggcgatctcctcattgactctctccaagatcacctcgagaaagtcaaggcacttcgaggagaaattgcgcctctgaaagagaacgtgagccacgtcaatgaccttgctcgccagcttaccactttgggcattcagctctcaccgtataacctcagcactctggaagacctgaacaccagatggaagcttctgcaggtggccgtcgaggaccgagtcaggcagctgcatgaagcccacagggactttggtccagcatctcagcactttctttccacgtctgtccagggtccctgggagagagccatctcgccaaacaaagtgccctactatatcaaccacgagactcaaacaacttgctgggaccatcccaaaatgacagagctctaccagtctttagctgacctgaataatgtcagattctcagcttataggactgccatgaaactccgaagactgcagaaggccctttgcttggatctcttgagcctgtcagctgcatgtgatgccttggaccagcacaacctcaagcaaaatgaccagcccatggatatcctgcagattattaattgtttgaccactatttatgaccgcctggagcaagagcacaacaatttggtcaacgtccctctctgcgtggatatgtgtctgaactggctgctgaatgtttatgatacgggacgaacagggaggatccgtgtcctgtcttttaaaactggcatcatttccctgtgtaaagcacatttggaagacaagtacagataccttttcaagcaagtggcaagttcaacaggattttgtgaccagcgcaggctgggcctccttctgcatgattctatccaaattccaagacagttgggtgaagttgcatcctttgggggcagtaacattgagccaagtgtccggagctgcttccaatttgctaataataagccagagatcgaagcggccctcttcctagactggatgagactggaaccccagtccatggtgtggctgcccgtcctgcacagagtggctgctgcagaaactgccaagcatcaggccaaatgtaacatctgcaaagagtgtccaatcattggattcaggtacaggagtctaaagcactttaattatgacatctgccaaagctgctttttttctggtcgagttgcaaaaggccataaaatgcactatcccatggtggaatattgcactccgactacatcaggagaagatgttcgagactttgccaaggtactaaaaaacaaatttcgaaccaaaaggtattttgcgaagcatccccgaatgggctacctgccagtgcagactgtcttagagggggacaacatggaaactcccgttactctgatcaacttctggccagtagattctgcgcctgcctcgtcccctcagctttcacacgatgatactcattcacgcattgaacattatgctagcaggctagcagaaatggaaaacagcaatggatcttatctaaatgatagcatctctcctaatgagagcatagatgatgaacatttgttaatccagcattactgccaaagtttgaaccaggactcccccctgagccagcctcgtagtcctgcccagatcttgatttccttagagagtgaggaaagaggggagctagagagaatcctagcagatcttgaggaagaaaacaggaatctgcaagcagaatatgaccgtctaaagcagcagcacgaacataaaggcctgtccccactgccgtcccctcctgaaatgatgcccacctctccccagagtccccgggatgctgagctcattgctgaggccaagctactgcgtcaacacaaaggccgcctggaagccaggatgcaaatcctggaagaccacaataaacagctggagtcacagttacacaggctaaggcagctgctggagcaaccccaggcagaggccaaagtgaatggcacaacggtgtcctctccttctacctctctacagaggtccgacagcagtcagcctatgctgctccgagtggttggcagtcaaacttcggactccatgggtgaggaagatcttctcagtcctccccaggacacaagcacagggttagaggaggtgatggagcaactcaacaactccttccctagttcaagaggaagaaatacccctggaaagccaatgagagaggacacaatg

SEQ ID NO: 145 - DNA, 4572 bp, Homo sapiens
  source 1..4572: mol_type = genomic DNA
atggccaagtatggagaacatgaagccagtcctgacaatgggcagaacgaattcagtgatatcattaagtccagatctgatgaacacaatgacgtacagaagaaaacctttaccaaatggataaatgctcgattttcaaagagtgggaaaccacccatcaatgatatgttcacagacctcaaagatggaaggaagctattggatcttctagaaggcctcacaggaacatcactgccaaaggaacgtggttccacaagggtacatgccttaaataacgtcaacagagtgctgcaggttttacatcagaacaatgtggaattagtgaatatagggggaactgacattgtggatggaaatcacaaactgactttggggttactttggagcatcattttgcactggcaggtgaaagatgtcatgaaggatgtcatgtcggacctgcagcagacgaacagtgagaagatcctgctcagctgggtgcgtcagaccaccaggccctacagccaagtcaacgtcctcaacttcaccaccagctggacagatggactcgcctttaatgctgtcctccaccgacataaacctgatctcttcagctgggataaagttgtcaaaatgtcaccaattgagagacttgaacatgccttcagcaaggctcaaacttatttgggaattgaaaagctgttagatcctgaagatgttgccgttcagcttcctgacaagaaatccataattatgtatttaacatctttgtttgaggtgctacctcagcaagtcaccatagacgccatccgtgaggtagagacactcccaaggaaatataaaaaagaatgtgaagaagaggcaattaatatacagagtacagcgcctgaggaggagcatgagagtccccgagctgaaactcccagcactgtcactgaggttgacatggatctggacagctatcagattgcgttggaggaagtgctgacctggttgctttctgctgaggacactttccaggagcaggatgatatttctgatgatgttgaagaagtcaaagaccagtttgcaacccatgaagcttttatgatggaactgactgcacaccagagcagtgtgggcagcgtcctgcaggcaggcaaccaactgataacacaaggaactctgtcagacgaagaagaatttgagattcaggaacagatgaccctgctgaatgctagatgggaggctcttagggtggagagtatggacagacagtcccggctgcacgatgtgctgatggaactgcagaagaagcaactgcagcagctctccgcctggttaacactcacagaggagcgcattcagaagatggaaacttgccccctggatgatgatgtaaaatctctacaaaagctgctagaagaacataaaagtttgcaaagtgatcttgaggctgaacaggtgaaagtaaattcactaactcacatggtggtcattgttgatgaaaacagtggtgagagtgctacagctatcctagaagaccagttacagaaacttggtgagcgctggacagcagtatgccgttggactgaagaacgctggaataggttacaagaaatcaatatattgtggcaggaattattggaagaacagtgcttgttgaaagcttggttaaccgaaaaagaagaggctttaaataaagtccagacaagcaacttcaaagaccaaaaggaactaagtgtcagtgttcgacgtctggctattttgaaggaagacatggaaatgaagcgtcaaacattggatcagctgagtgagattggccaggatgtgggacaattacttgataattccaaggcatctaagaagatcaacagtgactcagaggaactgactcaaagatgggattctttggttcagagactagaagattcctccaaccaggtgactcaggctgccgctagcgccagttctgaccagtggaagcgtctgcacctttctctgcaggaacttctggtgtggctacagctgaaagatgatgaattaagccggcaggcacctattggaggcgactttccagcagttcagaagcagaacgatgtacatagggccttcaagagggaattgaaaactaaagaacctgtaatcatgagtactcttgagactgtacgaatatttctgacagagcagcctttggaaggactagagaaactctaccaggagcccagagagctgcctcctgaggagagagcccagaatgtcactcggcttctacgaaagcaggctgaggaggtcaatactgagtgggaaaaattgaacctgcactccgctgaccagagaaaaatagatgagacccttgaaagactccgggaacttcaagaggccacggatgagctggacctcaagctgcgccaagctgaggtgatcaagggatcctggcagcccgtgggcgatctcctcattgactctctccaagatcacctcgagaaagtcaaggcacttcgaggagaaattgcgcctctgaaagagaacgtgagccacgtcaatgaccttgctcgccagcttaccactttgggcattcagctctcaccgtataacctcagcactctggaagacctgaacaccagatggaagcttctgcaggtggccgtcgaggaccgagtcaggcagctgcatgaagcccacagggactttggtccagcatctcagcactttctttccacgtctgtccagggtccctgggagagagccatctcgccaaacaaagtgccctactatatcaaccacgagactcaaacaacttgctgggaccatcccaaaatgacagagctctaccagtctttagctgacctgaataatgtcagattctcagcttataggactgccatgaaactccgaagactgcagaaggccctttgcttggatctcttgagcctgtcagctgcatgtgatgccttggaccagcacaacctcaagcaaaatgaccagcccatggatatcctgcagattattaattgtttgaccactatttatgaccgcctggagcaagagcacaacaatttggtcaacgtccctctctgcgtggatatgtgtctgaactggctgctgaatgtttatgatacgggacgaacagggaggatccgtgtcctgtcttttaaaactggcatcatttccctgtgtaaagcacatttggaagacaagtacagataccttttcaagcaagtggcaagttcaacaggattttgtgaccagcgcaggctgggcctccttctgcatgattctatccaaattccaagacagttgggtgaagttgcatcctttgggggcagtaacattgagccaagtgtccggagctgcttccaatttgctaataataagccagagatcgaagcggccctcttcctagactggatgagactggaaccccagtccatggtgtggctgcccgtcctgcacagagtggctgctgcagaaactgccaagcatcaggccaaatgtaacatctgcaaagagtgtccaatcattggattcaggtacaggagtctaaagcactttaattatgacatctgccaaagctgctttttttctggtcgagttgcaaaaggccataaaatgcactatcccatggtggaatattgcactccgactacatcaggagaagatgttcgagactttgccaaggtactaaaaaacaaatttcgaaccaaaaggtattttgcgaagcatccccgaatgggctacctgccagtgcagactgtcttagagggggacaacatggaaactcccgttactctgatcaacttctggccagtagattctgcgcctgcctcgtcccctcagctttcacacgatgatactcattcacgcattgaacattatgctagcaggctagcagaaatggaaaacagcaatggatcttatctaaatgatagcatctctcctaatgagagcatagatgatgaacatttgttaatccagcattactgccaaagtttgaaccaggactcccccctgagccagcctcgtagtcctgcccagatcttgatttccttagagagtgaggaaagaggggagctagagagaatcctagcagatcttgaggaagaaaacaggaatctgcaagcagaatatgaccgtctaaagcagcagcacgaacataaaggcctgtccccactgccgtcccctcctgaaatgatgcccacctctccccagagtccccgggatgctgagctcattgctgaggccaagctactgcgtcaacacaaaggccgcctggaagccaggatgcaaatcctggaagaccacaataaacagctggagtcacagttacacaggctaaggcagctgctggagcaaccccaggcagaggccaaagtgaatggcacaacggtgtcctctccttctacctctctacagaggtccgacagcagtcagcctatgctgctccgagtggttggcagtcaaacttcggactccatgggtgaggaagatcttctcagtcctccccaggacacaagcacagggttagaggaggtgatggagcaactcaacaactccttccctagttcaagaggaagaaatacccctggaaagccaatgagagaggacacaatg

SEQ ID NO: 146 - DNA, 4572 bp, synthetic construct
  source 1..4572: mol_type = other DNA
atggccaagtacggcgagcacgaggccagccccgacaacggccagaacgagttcagcgacatcatcaagagccggagcgacgagcacaacgacgtgcagaagaagaccttcaccaagtggatcaacgcccggttcagcaagagcggcaagccccccatcaacgacatgttcaccgacctgaaggacggccggaagctgctggacctgctggagggcctgaccggcaccagcctgcccaaggagcggggcagcacccgggtgcacgccctgaacaacgtgaaccgggtgctgcaggtgctgcaccagaacaacgtggagctggtgaacatcggcggcaccgacatcgtggacggcaaccacaagctgaccctgggcctgctgtggagcatcatcctgcactggcaggtgaaggacgtgatgaaggacgtgatgagcgacctgcagcagaccaacagcgagaagatcctgctgagctgggtgcggcagaccacccggccctacagccaggtgaacgtgctgaacttcaccaccagctggaccgacggcctggccttcaacgccgtgctgcaccggcacaagcccgacctgttcagctgggacaaggtggtgaagatgagccccatcgagcggctggagcacgccttcagcaaggcccagacctacctgggcatcgagaagctgctggaccccgaggacgtggccgtgcagctgcccgacaagaagagcatcatcatgtacctgaccagcctgttcgaggtgctgccccagcaggtgaccatcgacgccatccgggaggtggagaccctgccccggaagtacaagaaggagtgcgaggaggaggccatcaacatccagagcaccgcccccgaggaggagcacgagagcccccgggccgagacccccagcaccgtgaccgaggtggacatggacctggacagctaccagatcgccctggaggaggtgctgacctggctgctgagcgccgaggacaccttccaggagcaggacgacatcagcgacgacgtggaggaggtgaaggaccagttcgccacccacgaggccttcatgatggagctgaccgcccaccagagcagcgtgggcagcgtgctgcaggccggcaaccagctgatcacccagggcaccctgagcgacgaggaggagttcgagatccaggagcagatgaccctgctgaacgcccggtgggaggccctgcgggtggagagcatggaccggcagagccggctgcacgacgtgctgatggagctgcagaagaagcagctgcagcagctgagcgcctggctgaccctgaccgaggagcggatccagaagatggagacctgccccctggacgacgacgtgaagagcctgcagaagctgctggaggagcacaagagcctgcagagcgacctggaggccgagcaggtgaaggtgaacagcctgacccacatggtggtgatcgtggacgagaacagcggcgagagcgccaccgccatcctggaggaccagctgcagaagctgggcgagcggtggaccgccgtgtgccggtggaccgaggagcggtggaaccggctgcaggagatcaacatcctgtggcaggagctgctggaggagcagtgcctgctgaaggcctggctgaccgagaaggaggaggccctgaacaaggtgcagaccagcaacttcaaggaccagaaggagctgagcgtgagcgtgcggcggctggccatcctgaaggaggacatggagatgaagcggcagaccctggaccagctgagcgagatcggccaggacgtgggccagctgctggacaacagcaaggccagcaagaagatcaacagcgacagcgaggagctgacccagcggtgggacagcctggtgcagcggctggaggacagcagcaaccaggtgacccaggccgccgctagcgccagcagcgaccagtggaagcggctgcacctgagcctgcaggagctgctggtgtggctgcagctgaaggacgacgagctgagccggcaggcccccatcggcggcgacttccccgccgtgcagaagcagaacgacgtgcaccgggccttcaagcgggagctgaagaccaaggagcccgtgatcatgagcaccctggagaccgtgcggatcttcctgaccgagcagcccctggagggcctggagaagctgtaccaggagccccgggagctgccccccgaggagcgggcccagaacgtgacccggctgctgcggaagcaggccgaggaggtgaacaccgagtgggagaagctgaacctgcacagcgccgaccagagaaaaatagatgagacccttgaaagactccgggaacttcaagaggccacggatgagctggacctcaagctgcgccaagctgaggtgatcaagggatcctggcagcccgtgggcgatctcctcattgactctctccaagatcacctcgagaaagtcaaggcacttcgaggagaaattgcgcctctgaaagagaacgtgagccacgtcaatgaccttgctcgccagcttaccactttgggcattcagctctcaccgtataacctcagcactctggaagacctgaacaccagatggaagcttctgcaggtggccgtcgaggaccgagtcaggcagctgcatgaagcccacagggactttggtccagcatctcagcactttctttccacgtctgtccagggtccctgggagagagccatctcgccaaacaaagtgccctactatatcaaccacgagactcaaacaacttgctgggaccatcccaaaatgacagagctctaccagtctttagctgacctgaataatgtcagattctcagcttataggactgccatgaaactccgaagactgcagaaggccctttgcttggatctcttgagcctgtcagctgcatgtgatgccttggaccagcacaacctcaagcaaaatgaccagcccatggatatcctgcagattattaattgtttgaccactatttatgaccgcctggagcaagagcacaacaatttggtcaacgtccctctctgcgtggatatgtgtctgaactggctgctgaatgtttatgatacgggacgaacagggaggatccgtgtcctgtcttttaaaactggcatcatttccctgtgtaaagcacatttggaagacaagtacagataccttttcaagcaagtggcaagttcaacaggattttgtgaccagcgcaggctgggcctccttctgcatgattctatccaaattccaagacagttgggtgaagttgcatcctttgggggcagtaacattgagccaagtgtccggagctgcttccaatttgctaataataagccagagatcgaagcggccctcttcctagactggatgagactggaaccccagtccatggtgtggctgcccgtcctgcacagagtggctgctgcagaaactgccaagcatcaggccaaatgtaacatctgcaaagagtgtccaatcattggattcaggtacaggagtctaaagcactttaattatgacatctgccaaagctgctttttttctggtcgagttgcaaaaggccataaaatgcactatcccatggtggaatattgcactccgactacatcaggagaagatgttcgagactttgccaaggtactaaaaaacaaatttcgaaccaaaaggtattttgcgaagcatccccgaatgggctacctgccagtgcagactgtcttagagggggacaacatggaaactcccgttactctgatcaacttctggccagtagattctgcgcctgcctcgtcccctcagctttcacacgatgatactcattcacgcattgaacattatgctagcaggctagcagaaatggaaaacagcaatggatcttatctaaatgatagcatctctcctaatgagagcatagatgatgaacatttgttaatccagcattactgccaaagtttgaaccaggactcccccctgagccagcctcgtagtcctgcccagatcttgatttccttagagagtgaggaaagaggggagctagagagaatcctagcagatcttgaggaagaaaacaggaatctgcaagcagaatatgaccgtctaaagcagcagcacgaacataaaggcctgtccccactgccgtcccctcctgaaatgatgcccacctctccccagagtccccgggatgctgagctcattgctgaggccaagctactgcgtcaacacaaaggccgcctggaagccaggatgcaaatcctggaagaccacaataaacagctggagtcacagttacacaggctaaggcagctgctggagcaaccccaggcagaggccaaagtgaatggcacaacggtgtcctctccttctacctctctacagaggtccgacagcagtcagcctatgctgctccgagtggttggcagtcaaacttcggactccatgggtgaggaagatcttctcagtcctccccaggacacaagcacagggttagaggaggtgatggagcaactcaacaactccttccctagttcaagaggaagaaatacccctggaaagccaatgagagaggacacaatg

SEQ ID NO: 147 - DNA, 4176 bp, Homo sapiens
  source 1..4176: mol_type = genomic DNA
atggccaagtatggagaacatgaagccagtcctgacaatgggcagaacgaattcagtgatatcattaagtccagatctgatgaacacaatgacgtacagaagaaaacctttaccaaatggataaatgctcgattttcaaagagtgggaaaccacccatcaatgatatgttcacagacctcaaagatggaaggaagctattggatcttctagaaggcctcacaggaacatcactgccaaaggaacgtggttccacaagggtacatgccttaaataacgtcaacagagtgctgcaggttttacatcagaacaatgtggaattagtgaatatagggggaactgacattgtggatggaaatcacaaactgactttggggttactttggagcatcattttgcactggcaggtgaaagatgtcatgaaggatgtcatgtcggacctgcagcagacgaacagtgagaagatcctgctcagctgggtgcgtcagaccaccaggccctacagccaagtcaacgtcctcaacttcaccaccagctggacagatggactcgcctttaatgctgtcctccaccgacataaacctgatctcttcagctgggataaagttgtcaaaatgtcaccaattgagagacttgaacatgccttcagcaaggctcaaacttatttgggaattgaaaagctgttagatcctgaagatgttgccgttcagcttcctgacaagaaatccataattatgtatttaacatctttgtttgaggtgctacctcagcaagtcaccatagacgccatccgtgaggtagagacactcccaaggaaatataaaaaagaatgtgaagaagaggcaattaatatacagagtacagcgcctgaggaggagcatgagagtccccgagctgaaactcccagcactgtcactgaggttgacatggatctggacagctatcagattgcgttggaggaagtgctgacctggttgctttctgctgaggacactttccaggagcaggatgatatttctgatgatgttgaagaagtcaaagaccagtttgcaacccatgaagcttttatgatggaactgactgcacaccagagcagtgtgggcagcgtcctgcaggcaggcaaccaactgataacacaaggaactctgtcagacgaagaagaatttgagattcaggaacagatgaccctgctgaatgctagatgggaggctcttagggtggagagtatggacagacagtcccggctgcacgatgtgctgatggaactgcagaagaagcaactgcagcagctctccgcctggttaacactcacagaggagcgcattcagaagatggaaacttgccccctggatgatgatgtaaaatctctacaaaagctgctagaagaacataaaagtttgcaaagtgatcttgaggctgaacaggtgaaagtaaattcactaactcacatggtggtcattgttgatgaaaacagtggtgagagtgctacagctatcctagaagaccagttacagaaacttggtgagcgctggacagcagtatgccgttggactgaagaacgctggaataggttacaagaaatcaatatattgtggcaggaattattggaagaacagtgcttgttgaaagcttggttaaccgaaaaagaagaggctttaaataaagtccagacaagcaacttcaaagaccaaaaggaactaagtgtcagtgttcgacgtctggctattttgaaggaagacatggaaatgaagcgtcaaacattggatcagctgagtgagattggccaggatgtgggacaattacttgataattccaaggcatctaagaagatcaacagtgactcagaggaactgactcaaagatgggattctttggttcagagactagaagattcctccaaccaggtgactcaggctgccgctagcgccagttctgaccagtggaagcgtctgcacctttctctgcaggaacttctggtgtggctacagctgaaagatgatgaattaagccggcaggcacctattggaggcgactttccagcagttcagaagcagaacgatgtacatagggccttcaagagggaattgaaaactaaagaacctgtaatcatgagtactcttgagactgtacgaatatttctgacagagcagcctttggaaggactagagaaactctaccaggagcccagagagctgcctcctgaggagagagcccagaatgtcactcggcttctacgaaagcaggctgaggaggtcaatactgagtgggaaaaattgaacctgcactccgctgaccagagaaaaatagatgagacccttgaaagactccgggaacttcaagaggccacggatgagctggacctcaagctgcgccaagctgaggtgatcaagggatcctggcagcccgtgggcgatctcctcattgactctctccaagatcacctcgagaaagtcaaggcacttcgaggagaaattgcgcctctgaaagagaacgtgagccacgtcaatgaccttgctcgccagcttaccactttgggcattcagctctcaccgtataacctcagcactctggaagacctgaacaccagatggaagcttctgcaggtggccgtcgaggaccgagtcaggcagctgcatgaagcccacagggactttggtccagcatctcagcactttctttccacgtctgtccagggtccctgggagagagccatctcgccaaacaaagtgccctactatatcaaccacgagactcaaacaacttgctgggaccatcccaaaatgacagagctctaccagtctttagctgacctgaataatgtcagattctcagcttataggactgccatgaaactccgaagactgcagaaggccctttgcttggatctcttgagcctgtcagctgcatgtgatgccttggaccagcacaacctcaagcaaaatgaccagcccatggatatcctgcagattattaattgtttgaccactatttatgaccgcctggagcaagagcacaacaatttggtcaacgtccctctctgcgtggatatgtgtctgaactggctgctgaatgtttatgatacgggacgaacagggaggatccgtgtcctgtcttttaaaactggcatcatttccctgtgtaaagcacatttggaagacaagtacagataccttttcaagcaagtggcaagttcaacaggattttgtgaccagcgcaggctgggcctccttctgcatgattctatccaaattccaagacagttgggtgaagttgcatcctttgggggcagtaacattgagccaagtgtccggagctgcttccaatttgctaataataagccagagatcgaagcggccctcttcctagactggatgagactggaaccccagtccatggtgtggctgcccgtcctgcacagagtggctgctgcagaaactgccaagcatcaggccaaatgtaacatctgcaaagagtgtccaatcattggattcaggtacaggagtctaaagcactttaattatgacatctgccaaagctgctttttttctggtcgagttgcaaaaggccataaaatgcactatcccatggtggaatattgcactccgactacatcaggagaagatgttcgagactttgccaaggtactaaaaaacaaatttcgaaccaaaaggtattttgcgaagcatccccgaatgggctacctgccagtgcagactgtcttagagggggacaacatggaaactcccgttactctgatcaacttctggccagtagattctgcgcctgcctcgtcccctcagctttcacacgatgatactcattcacgcattgaacattatgctagcaggctagcagaaatggaaaacagcaatggatcttatctaaatgatagcatctctcctaatgagagcatagatgatgaacatttgttaatccagcattactgccaaagtttgaaccaggactcccccctgagccagcctcgtagtcctgcccagatcttgatttccttagagagtgaggaaagaggggagctagagagaatcctagcagatcttgaggaagaaaacaggaatctgcaagcagaatatgaccgtctaaagcagcagcacgaacataaaggcctgtccccactgccgtcccctcctgaaatgatgcccacctctccccagagtccc

SEQ ID NO: 148 - DNA, 4176 bp, synthetic construct
  source 1..4176: mol_type = other DNA
atggccaagtacggcgagcacgaggccagccccgacaacggccagaacgagttcagcgacatcatcaagagccggagcgacgagcacaacgacgtgcagaagaagaccttcaccaagtggatcaacgcccggttcagcaagagcggcaagccccccatcaacgacatgttcaccgacctgaaggacggccggaagctgctggacctgctggagggcctgaccggcaccagcctgcccaaggagcggggcagcacccgggtgcacgccctgaacaacgtgaaccgggtgctgcaggtgctgcaccagaacaacgtggagctggtgaacatcggcggcaccgacatcgtggacggcaaccacaagctgaccctgggcctgctgtggagcatcatcctgcactggcaggtgaaggacgtgatgaaggacgtgatgagcgacctgcagcagaccaacagcgagaagatcctgctgagctgggtgcggcagaccacccggccctacagccaggtgaacgtgctgaacttcaccaccagctggaccgacggcctggccttcaacgccgtgctgcaccggcacaagcccgacctgttcagctgggacaaggtggtgaagatgagccccatcgagcggctggagcacgccttcagcaaggcccagacctacctgggcatcgagaagctgctggaccccgaggacgtggccgtgcagctgcccgacaagaagagcatcatcatgtacctgaccagcctgttcgaggtgctgccccagcaggtgaccatcgacgccatccgggaggtggagaccctgccccggaagtacaagaaggagtgcgaggaggaggccatcaacatccagagcaccgcccccgaggaggagcacgagagcccccgggccgagacccccagcaccgtgaccgaggtggacatggacctggacagctaccagatcgccctggaggaggtgctgacctggctgctgagcgccgaggacaccttccaggagcaggacgacatcagcgacgacgtggaggaggtgaaggaccagttcgccacccacgaggccttcatgatggagctgaccgcccaccagagcagcgtgggcagcgtgctgcaggccggcaaccagctgatcacccagggcaccctgagcgacgaggaggagttcgagatccaggagcagatgaccctgctgaacgcccggtgggaggccctgcgggtggagagcatggaccggcagagccggctgcacgacgtgctgatggagctgcagaagaagcagctgcagcagctgagcgcctggctgaccctgaccgaggagcggatccagaagatggagacctgccccctggacgacgacgtgaagagcctgcagaagctgctggaggagcacaagagcctgcagagcgacctggaggccgagcaggtgaaggtgaacagcctgacccacatggtggtgatcgtggacgagaacagcggcgagagcgccaccgccatcctggaggaccagctgcagaagctgggcgagcggtggaccgccgtgtgccggtggaccgaggagcggtggaaccggctgcaggagatcaacatcctgtggcaggagctgctggaggagcagtgcctgctgaaggcctggctgaccgagaaggaggaggccctgaacaaggtgcagaccagcaacttcaaggaccagaaggagctgagcgtgagcgtgcggcggctggccatcctgaaggaggacatggagatgaagcggcagaccctggaccagctgagcgagatcggccaggacgtgggccagctgctggacaacagcaaggccagcaagaagatcaacagcgacagcgaggagctgacccagcggtgggacagcctggtgcagcggctggaggacagcagcaaccaggtgacccaggccgccgctagcgccagcagcgaccagtggaagcggctgcacctgagcctgcaggagctgctggtgtggctgcagctgaaggacgacgagctgagccggcaggcccccatcggcggcgacttccccgccgtgcagaagcagaacgacgtgcaccgggccttcaagcgggagctgaagaccaaggagcccgtgatcatgagcaccctggagaccgtgcggatcttcctgaccgagcagcccctggagggcctggagaagctgtaccaggagccccgggagctgccccccgaggagcgggcccagaacgtgacccggctgctgcggaagcaggccgaggaggtgaacaccgagtgggagaagctgaacctgcacagcgccgaccagagaaaaatagatgagacccttgaaagactccgggaacttcaagaggccacggatgagctggacctcaagctgcgccaagctgaggtgatcaagggatcctggcagcccgtgggcgatctcctcattgactctctccaagatcacctcgagaaagtcaaggcacttcgaggagaaattgcgcctctgaaagagaacgtgagccacgtcaatgaccttgctcgccagcttaccactttgggcattcagctctcaccgtataacctcagcactctggaagacctgaacaccagatggaagcttctgcaggtggccgtcgaggaccgagtcaggcagctgcatgaagcccacagggactttggtccagcatctcagcactttctttccacgtctgtccagggtccctgggagagagccatctcgccaaacaaagtgccctactatatcaaccacgagactcaaacaacttgctgggaccatcccaaaatgacagagctctaccagtctttagctgacctgaataatgtcagattctcagcttataggactgccatgaaactccgaagactgcagaaggccctttgcttggatctcttgagcctgtcagctgcatgtgatgccttggaccagcacaacctcaagcaaaatgaccagcccatggatatcctgcagattattaattgtttgaccactatttatgaccgcctggagcaagagcacaacaatttggtcaacgtccctctctgcgtggatatgtgtctgaactggctgctgaatgtttatgatacgggacgaacagggaggatccgtgtcctgtcttttaaaactggcatcatttccctgtgtaaagcacatttggaagacaagtacagataccttttcaagcaagtggcaagttcaacaggattttgtgaccagcgcaggctgggcctccttctgcatgattctatccaaattccaagacagttgggtgaagttgcatcctttgggggcagtaacattgagccaagtgtccggagctgcttccaatttgctaataataagccagagatcgaagcggccctcttcctagactggatgagactggaaccccagtccatggtgtggctgcccgtcctgcacagagtggctgctgcagaaactgccaagcatcaggccaaatgtaacatctgcaaagagtgtccaatcattggattcaggtacaggagtctaaagcactttaattatgacatctgccaaagctgctttttttctggtcgagttgcaaaaggccataaaatgcactatcccatggtggaatattgcactccgactacatcaggagaagatgttcgagactttgccaaggtactaaaaaacaaatttcgaaccaaaaggtattttgcgaagcatccccgaatgggctacctgccagtgcagactgtcttagagggggacaacatggaaactcccgttactctgatcaacttctggccagtagattctgcgcctgcctcgtcccctcagctttcacacgatgatactcattcacgcattgaacattatgctagcaggctagcagaaatggaaaacagcaatggatcttatctaaatgatagcatctctcctaatgagagcatagatgatgaacatttgttaatccagcattactgccaaagtttgaaccaggactcccccctgagccagcctcgtagtcctgcccagatcttgatttccttagagagtgaggaaagaggggagctagagagaatcctagcagatcttgaggaagaaaacaggaatctgcaagcagaatatgaccgtctaaagcagcagcacgaacataaaggcctgtccccactgccgtcccctcctgaaatgatgcccacctctccccagagtccc

SEQ ID NO: 149 - protein, 1402 aa, synthetic construct
MAKYGEHEASPDNGQNEFSDIIKSRSDEHNDVQKKTFTKWINARFSKSGKPPINDMFTDLKDGRKLLDLLEGLTGTSLPKERGSTRVHALNNVNRVLQVLHQNNVELVNIGGTDIVDGNHKLTLGLLWSIILHWQVKDVMKDVMSDLQQTNSEKILLSWVRQTTRPYSQVNVLNFTTSWTDGLAFNAVLHRHKPDLFSWDKVVKMSPIERLEHAFSKAQTYLGIEKLLDPEDVAVQLPDKKSIIMYLTSLFEVLPQQVTIDAIREVETLPRKYKKECEEEAINIQSTAPEEEHESPRAETPSTVTEVDMDLDSYQIALEEVLTWLLSAEDTFQEQDDISDDVEEVKDQFATHEAFMMELTAHQSSVGSVLQAGNQLITQGTLSDEEEFEIQEQMTLLNARWEALRVESMDRQSRLHDVLMELQKKQLQQLSAWLTLTEERIQKMETCPLDDDVKSLQKLLEEHKSLQSDLEAEQVKVNSLTHMVVIVDENSGESATAILEDQLQKLGERWTAVCRWTEERWNRLQEINILWQELLEEQCLLKAWLTEKEEALNKVQTSNFKDQKELSVSVRRLAILKEDMEMKRQTLDQLSEIGQDVGQLLDNSKASKKINSDSEELTQRWDSLVQRLEDSSNQVTQAAASAQRKIDETLERLQELQEATDELDLKLRQAEVIKGSWQPVGDLLIDSLQDHLEKVKALRGEIAPLKENVSHVNDLARQLTTLGIQLSPYNLSTLEDLNTRWKLLQVAVEDRVRQLHEAHRDFGPASQHFLSTSVQGPWERAISPNKVPYYINHETQTTCWDHPKMTELYQSLADLNNVRFSAYRTAMKLRRLQKALCLDLLSLSAACDALDQHNLKQNDQPMDILQIINCLTTIYDRLEQEHNNLVNVPLCVDMCLNWLLNVYDTGRTGRIRVLSFKTGIISLCKAHLEDKYRYLFKQVASSTGFCDQRRLGLLLHDSIQIPRQLGEVASFGGSNIEPSVRSCFQFANNKPEIEAALFLDWMRLEPQSMVWLPVLHRVAAAETAKHQAKCNICKECPIIGFRYRSLKHFNYDICQSCFFSGRVAKGHKMHYPMVEYCTPTTSGEDVRDFAKVLKNKFRTKRYFAKHPRMGYLPVQTVLEGDNMETPVTLINFWPVDSAPASSPQLSHDDTHSRIEHYASRLAEMENSNGSYLNDSISPNESIDDEHLLIQHYCQSLNQDSPLSQPRSPAQILISLESEERGELERILADLEEENRNLQAEYDRLKQQHEHKGLSPLPSPPEMMPTSPQSPRDAELIAEAKLLRQHKGRLEARMQILEDHNKQLESQLHRLRQLLEQPQAEAKVNGTTVSSPSTSLQRSDSSQPMLLRVVGSQTSDSMGEEDLLSPPQDTSTGLEEVMEQLNNSFPSSRGRNTPGKPMREDTM

SEQ ID NO: 150 - protein, 1207 aa, synthetic construct
MAKYGEHEASPDNGQNEFSDIIKSRSDEHNDVQKKTFTKWINARFSKSGKPPINDMFTDLKDGRKLLDLLEGLTGTSLPKERGSTRVHALNNVNRVLQVLHQNNVELVNIGGTDIVDGNHKLTLGLLWSIILHWQVKDVMKDVMSDLQQTNSEKILLSWVRQTTRPYSQVNVLNFTTSWTDGLAFNAVLHRHKPDLFSWDKVVKMSPIERLEHAFSKAQTYLGIEKLLDPEDVAVQLPDKKSIIMYLTSLFEVLPQQVTIDAIREVETLPRKYKKECEEEAINIQSTAPEEEHESPRAETPSTVTEVDMDLDSYQIALEEVLTWLLSAEDTFQEQDDISDDVEEVKDQFATHEAFMMELTAHQSSVGSVLQAGNQLITQGTLSDEEEFEIQEQMTLLNARWEALRVESMDRQSRLHDVLMELQKKQLQQLSAWLTLTEERIQKMETCPLDDDVKSLQKLLEEHKSLQSDLEAEQVKVNSLTHMVVIVDENSGESATAILEDQLQKLGERWTAVCRWTEERWNRLQEINILWQELLEEQCLLKAWLTEKEEALNKVQTSNFKDQKELSVSVRRLAILKEDMEMKRQTLDQLSEIGQDVGQLLDNSKASKKINSDSEELTQRWDSLVQRLEDSSNQVTQAAASAQRKIDETLERLQELQEATDELDLKLRQAEVIKGSWQPVGDLLIDSLQDHLEKVKALRGEIAPLKENVSHVNDLARQLTTLGIQLSPYNLSTLEDLNTRWKLLQVAVEDRVRQLHEAHRDFGPASQHFLSTSVQGPWERAISPNKVPYYINHETQTTCWDHPKMTELYQSLADLNNVRFSAYRTAMKLRRLQKALCLDLLSLSAACDALDQHNLKQNDQPMDILQIINCLTTIYDRLEQEHNNLVNVPLCVDMCLNWLLNVYDTGRTGRIRVLSFKTGIISLCKAHLEDKYRYLFKQVASSTGFCDQRRLGLLLHDSIQIPRQLGEVASFGGSNIEPSVRSCFQFANNKPEIEAALFLDWMRLEPQSMVWLPVLHRVAAAETAKHQAKCNICKECPIIGFRYRSLKHFNYDICQSCFFSGRVAKGHKMHYPMVEYCTPTTSGEDVRDFAKVLKNKFRTKRYFAKHPRMGYLPVQTVLEGDNMETPVTLINFWPVDSAPASSPQLSHDDTHSRIEHYASRLAEMENSNGSYLNDSISPNESIDDEHLLIQHYCQSLNQDSPLSQPRS

SEQ ID NO: 151 - protein, 1270 aa, synthetic construct
MAKYGEHEASPDNGQNEFSDIIKSRSDEHNDVQKKTFTKWINARFSKSGKPPINDMFTDLKDGRKLLDLLEGLTGTSLPKERGSTRVHALNNVNRVLQVLHQNNVELVNIGGTDIVDGNHKLTLGLLWSIILHWQVKDVMKDVMSDLQQTNSEKILLSWVRQTTRPYSQVNVLNFTTSWTDGLAFNAVLHRHKPDLFSWDKVVKMSPIERLEHAFSKAQTYLGIEKLLDPEDVAVQLPDKKSIIMYLTSLFEVLPQQVTIDAIREVETLPRKYKKECEEEAINIQSTAPEEEHESPRAETPSTVTEVDMDLDSYQIALEEVLTWLLSAEDTFQEQDDISDDVEEVKDQFATHEAFMMELTAHQSSVGSVLQAGNQLITQGTLSDEEEFEIQEQMTLLNARWEALRVESMDRQSRLHDVLMELQKKQLQQLSAWLTLTEERIQKMETCPLDDDVKSLQKLLEEHKSLQSDLEAEQVKVNSLTHMVVIVDENSGESATAILEDQLQKLGERWTAVCRWTEERWNRLQEINILWQELLEEQCLLKAWLTEKEEALNKVQTSNFKDQKELSVSVRRLAILKEDMEMKRQTLDQLSEIGQDVGQLLDNSKASKKINSDSEELTQRWDSLVQRLEDSSNQVTQAAASAQRKIDETLERLQELQEATDELDLKLRQAEVIKGSWQPVGDLLIDSLQDHLEKVKALRGEIAPLKENVSHVNDLARQLTTLGIQLSPYNLSTLEDLNTRWKLLQVAVEDRVRQLHEAHRDFGPASQHFLSTSVQGPWERAISPNKVPYYINHETQTTCWDHPKMTELYQSLADLNNVRFSAYRTAMKLRRLQKALCLDLLSLSAACDALDQHNLKQNDQPMDILQIINCLTTIYDRLEQEHNNLVNVPLCVDMCLNWLLNVYDTGRTGRIRVLSFKTGIISLCKAHLEDKYRYLFKQVASSTGFCDQRRLGLLLHDSIQIPRQLGEVASFGGSNIEPSVRSCFQFANNKPEIEAALFLDWMRLEPQSMVWLPVLHRVAAAETAKHQAKCNICKECPIIGFRYRSLKHFNYDICQSCFFSGRVAKGHKMHYPMVEYCTPTTSGEDVRDFAKVLKNKFRTKRYFAKHPRMGYLPVQTVLEGDNMETPVTLINFWPVDSAPASSPQLSHDDTHSRIEHYASRLAEMENSNGSYLNDSISPNESIDDEHLLIQHYCQSLNQDSPLSQPRSPAQILISLESEERGELERILADLEEENRNLQAEYDRLKQQHEHKGLSPLPSPPEMMPTSPQSP

SEQ ID NO: 152 - protein, 1239 aa, synthetic construct
MAKYGEHEASPDNGQNEFSDIIKSRSDEHNDVQKKTFTKWINARFSKSGKPPINDMFTDLKDGRKLLDLLEGLTGTSLPKERGSTRVHALNNVNRVLQVLHQNNVELVNIGGTDIVDGNHKLTLGLLWSIILHWQVKDVMKDVMSDLQQTNSEKILLSWVRQTTRPYSQVNVLNFTTSWTDGLAFNAVLHRHKPDLFSWDKVVKMSPIERLEHAFSKAQTYLGIEKLLDPEDVAVQLPDKKSIIMYLTSLFEVLPQQVTIDAIREVETLPRKYKKECEEEAINIQSTAPEEEHESPRAETPSTVTEVDMDLDSYQIALEEVLTWLLSAEDTFQEQDDISDDVEEVKDQFATHEAFMMELTAHQSSVGSVLQAGNQLITQGTLSDEEEFEIQEQMTLLNARWEALRVESMDRQSRLHDVLMELQKKQLQQLSAWLTLTEERIQKMETCPLDDDVKSLQKLLEEHKSLQSDLEAEQVKVNSLTHMVVIVDENSGESATAILEDQLQKLGERWTAVCRWTEERWNRLQEINILWQELLEEQCLLKAWLTEKEEALNKVQTSNFKDQKELSVSVRRLAILKEDMEMKRQTLDQLSEIGQDVGQLLDNSKASKKINSDSEELTQRWDSLVQRLEDSSNQVTQAVAKLGMSQIPQKDLLETVRVREQAITKKSKQEAASAQRKIDETLERLQELQEATDELDLKLRQAEVIKGSWQPVGDLLIDSLQDHLEKVKALRGEIAPLKENVSHVNDLARQLTTLGIQLSPYNLSTLEDLNTRWKLLQVAVEDRVRQLHEAHRDFGPASQHFLSTSVQGPWERAISPNKVPYYINHETQTTCWDHPKMTELYQSLADLNNVRFSAYRTAMKLRRLQKALCLDLLSLSAACDALDQHNLKQNDQPMDILQIINCLTTIYDRLEQEHNNLVNVPLCVDMCLNWLLNVYDTGRTGRIRVLSFKTGIISLCKAHLEDKYRYLFKQVASSTGFCDQRRLGLLLHDSIQIPRQLGEVASFGGSNIEPSVRSCFQFANNKPEIEAALFLDWMRLEPQSMVWLPVLHRVAAAETAKHQAKCNICKECPIIGFRYRSLKHFNYDICQSCFFSGRVAKGHKMHYPMVEYCTPTTSGEDVRDFAKVLKNKFRTKRYFAKHPRMGYLPVQTVLEGDNMETPVTLINFWPVDSAPASSPQLSHDDTHSRIEHYASRLAEMENSNGSYLNDSISPNESIDDEHLLIQHYCQSLNQDSPLSQPRS

SEQ ID NO: 153 - protein, 1434 aa, synthetic construct
MAKYGEHEASPDNGQNEFSDIIKSRSDEHNDVQKKTFTKWINARFSKSGKPPINDMFTDLKDGRKLLDLLEGLTGTSLPKERGSTRVHALNNVNRVLQVLHQNNVELVNIGGTDIVDGNHKLTLGLLWSIILHWQVKDVMKDVMSDLQQTNSEKILLSWVRQTTRPYSQVNVLNFTTSWTDGLAFNAVLHRHKPDLFSWDKVVKMSPIERLEHAFSKAQTYLGIEKLLDPEDVAVQLPDKKSIIMYLTSLFEVLPQQVTIDAIREVETLPRKYKKECEEEAINIQSTAPEEEHESPRAETPSTVTEVDMDLDSYQIALEEVLTWLLSAEDTFQEQDDISDDVEEVKDQFATHEAFMMELTAHQSSVGSVLQAGNQLITQGTLSDEEEFEIQEQMTLLNARWEALRVESMDRQSRLHDVLMELQKKQLQQLSAWLTLTEERIQKMETCPLDDDVKSLQKLLEEHKSLQSDLEAEQVKVNSLTHMVVIVDENSGESATAILEDQLQKLGERWTAVCRWTEERWNRLQEINILWQELLEEQCLLKAWLTEKEEALNKVQTSNFKDQKELSVSVRRLAILKEDMEMKRQTLDQLSEIGQDVGQLLDNSKASKKINSDSEELTQRWDSLVQRLEDSSNQVTQAVAKLGMSQIPQKDLLETVRVREQAITKKSKQEAASAQRKIDETLERLQELQEATDELDLKLRQAEVIKGSWQPVGDLLIDSLQDHLEKVKALRGEIAPLKENVSHVNDLARQLTTLGIQLSPYNLSTLEDLNTRWKLLQVAVEDRVRQLHEAHRDFGPASQHFLSTSVQGPWERAISPNKVPYYINHETQTTCWDHPKMTELYQSLADLNNVRFSAYRTAMKLRRLQKALCLDLLSLSAACDALDQHNLKQNDQPMDILQIINCLTTIYDRLEQEHNNLVNVPLCVDMCLNWLLNVYDTGRTGRIRVLSFKTGIISLCKAHLEDKYRYLFKQVASSTGFCDQRRLGLLLHDSIQIPRQLGEVASFGGSNIEPSVRSCFQFANNKPEIEAALFLDWMRLEPQSMVWLPVLHRVAAAETAKHQAKCNICKECPIIGFRYRSLKHFNYDICQSCFFSGRVAKGHKMHYPMVEYCTPTTSGEDVRDFAKVLKNKFRTKRYFAKHPRMGYLPVQTVLEGDNMETPVTLINFWPVDSAPASSPQLSHDDTHSRIEHYASRLAEMENSNGSYLNDSISPNESIDDEHLLIQHYCQSLNQDSPLSQPRSPAQILISLESEERGELERILADLEEENRNLQAEYDRLKQQHEHKGLSPLPSPPEMMPTSPQSPRDAELIAEAKLLRQHKGRLEARMQILEDHNKQLESQLHRLRQLLEQPQAEAKVNGTTVSSPSTSLQRSDSSQPMLLRVVGSQTSDSMGEEDLLSPPQDTSTGLEEVMEQLNNSFPSSRGRNTPGKPMREDTM

SEQ ID NO: 154 - protein, 1524 aa, synthetic construct
MAKYGEHEASPDNGQNEFSDIIKSRSDEHNDVQKKTFTKWINARFSKSGKPPINDMFTDLKDGRKLLDLLEGLTGTSLPKERGSTRVHALNNVNRVLQVLHQNNVELVNIGGTDIVDGNHKLTLGLLWSIILHWQVKDVMKDVMSDLQQTNSEKILLSWVRQTTRPYSQVNVLNFTTSWTDGLAFNAVLHRHKPDLFSWDKVVKMSPIERLEHAFSKAQTYLGIEKLLDPEDVAVQLPDKKSIIMYLTSLFEVLPQQVTIDAIREVETLPRKYKKECEEEAINIQSTAPEEEHESPRAETPSTVTEVDMDLDSYQIALEEVLTWLLSAEDTFQEQDDISDDVEEVKDQFATHEAFMMELTAHQSSVGSVLQAGNQLITQGTLSDEEEFEIQEQMTLLNARWEALRVESMDRQSRLHDVLMELQKKQLQQLSAWLTLTEERIQKMETCPLDDDVKSLQKLLEEHKSLQSDLEAEQVKVNSLTHMVVIVDENSGESATAILEDQLQKLGERWTAVCRWTEERWNRLQEINILWQELLEEQCLLKAWLTEKEEALNKVQTSNFKDQKELSVSVRRLAILKEDMEMKRQTLDQLSEIGQDVGQLLDNSKASKKINSDSEELTQRWDSLVQRLEDSSNQVTQAAASASSDQWKRLHLSLQELLVWLQLKDDELSRQAPIGGDFPAVQKQNDVHRAFKRELKTKEPVIMSTLETVRIFLTEQPLEGLEKLYQEPRELPPEERAQNVTRLLRKQAEEVNTEWEKLNLHSADQRKIDETLERLQELQEATDELDLKLRQAEVIKGSWQPVGDLLIDSLQDHLEKVKALRGEIAPLKENVSHVNDLARQLTTLGIQLSPYNLSTLEDLNTRWKLLQVAVEDRVRQLHEAHRDFGPASQHFLSTSVQGPWERAISPNKVPYYINHETQTTCWDHPKMTELYQSLADLNNVRFSAYRTAMKLRRLQKALCLDLLSLSAACDALDQHNLKQNDQPMDILQIINCLTTIYDRLEQEHNNLVNVPLCVDMCLNWLLNVYDTGRTGRIRVLSFKTGIISLCKAHLEDKYRYLFKQVASSTGFCDQRRLGLLLHDSIQIPRQLGEVASFGGSNIEPSVRSCFQFANNKPEIEAALFLDWMRLEPQSMVWLPVLHRVAAAETAKHQAKCNICKECPIIGFRYRSLKHFNYDICQSCFFSGRVAKGHKMHYPMVEYCTPTTSGEDVRDFAKVLKNKFRTKRYFAKHPRMGYLPVQTVLEGDNMETPVTLINFWPVDSAPASSPQLSHDDTHSRIEHYASRLAEMENSNGSYLNDSISPNESIDDEHLLIQHYCQSLNQDSPLSQPRSPAQILISLESEERGELERILADLEEENRNLQAEYDRLKQQHEHKGLSPLPSPPEMMPTSPQSPRDAELIAEAKLLRQHKGRLEARMQILEDHNKQLESQLHRLRQLLEQPQAEAKVNGTTVSSPSTSLQRSDSSQPMLLRVVGSQTSDSMGEEDLLSPPQDTSTGLEEVMEQLNNSFPSSRGRNTPGKPMREDTM

SEQ ID NO: 155 - protein, 1392 aa, synthetic construct
MAKYGEHEASPDNGQNEFSDIIKSRSDEHNDVQKKTFTKWINARFSKSGKPPINDMFTDLKDGRKLLDLLEGLTGTSLPKERGSTRVHALNNVNRVLQVLHQNNVELVNIGGTDIVDGNHKLTLGLLWSIILHWQVKDVMKDVMSDLQQTNSEKILLSWVRQTTRPYSQVNVLNFTTSWTDGLAFNAVLHRHKPDLFSWDKVVKMSPIERLEHAFSKAQTYLGIEKLLDPEDVAVQLPDKKSIIMYLTSLFEVLPQQVTIDAIREVETLPRKYKKECEEEAINIQSTAPEEEHESPRAETPSTVTEVDMDLDSYQIALEEVLTWLLSAEDTFQEQDDISDDVEEVKDQFATHEAFMMELTAHQSSVGSVLQAGNQLITQGTLSDEEEFEIQEQMTLLNARWEALRVESMDRQSRLHDVLMELQKKQLQQLSAWLTLTEERIQKMETCPLDDDVKSLQKLLEEHKSLQSDLEAEQVKVNSLTHMVVIVDENSGESATAILEDQLQKLGERWTAVCRWTEERWNRLQEINILWQELLEEQCLLKAWLTEKEEALNKVQTSNFKDQKELSVSVRRLAILKEDMEMKRQTLDQLSEIGQDVGQLLDNSKASKKINSDSEELTQRWDSLVQRLEDSSNQVTQAAASASSDQWKRLHLSLQELLVWLQLKDDELSRQAPIGGDFPAVQKQNDVHRAFKRELKTKEPVIMSTLETVRIFLTEQPLEGLEKLYQEPRELPPEERAQNVTRLLRKQAEEVNTEWEKLNLHSADQRKIDETLERLQELQEATDELDLKLRQAEVIKGSWQPVGDLLIDSLQDHLEKVKALRGEIAPLKENVSHVNDLARQLTTLGIQLSPYNLSTLEDLNTRWKLLQVAVEDRVRQLHEAHRDFGPASQHFLSTSVQGPWERAISPNKVPYYINHETQTTCWDHPKMTELYQSLADLNNVRFSAYRTAMKLRRLQKALCLDLLSLSAACDALDQHNLKQNDQPMDILQIINCLTTIYDRLEQEHNNLVNVPLCVDMCLNWLLNVYDTGRTGRIRVLSFKTGIISLCKAHLEDKYRYLFKQVASSTGFCDQRRLGLLLHDSIQIPRQLGEVASFGGSNIEPSVRSCFQFANNKPEIEAALFLDWMRLEPQSMVWLPVLHRVAAAETAKHQAKCNICKECPIIGFRYRSLKHFNYDICQSCFFSGRVAKGHKMHYPMVEYCTPTTSGEDVRDFAKVLKNKFRTKRYFAKHPRMGYLPVQTVLEGDNMETPVTLINFWPVDSAPASSPQLSHDDTHSRIEHYASRLAEMENSNGSYLNDSISPNESIDDEHLLIQHYCQSLNQDSPLSQPRSPAQILISLESEERGELERILADLEEENRNLQAEYDRLKQQHEHKGLSPLPSPPEMMPTSPQSP

SEQ ID NO: 156 - protein, 1287 aa, synthetic construct
MLWWEEVEDCYEREDVQKKTFTKWVNAQFSKFGKQHIENLFSDLQDGRRLLDLLEGLTGQKLPKEKGSTRVHALNNVNKALRVLQNNNVDLVNIGSTDIVDGNHKLTLGLIWNIILHWQVKNVMKNIMAGLQQTNSEKILLSWVRQSTRNYPQVNVINFTTSWSDGLALNALIHSHRPDLFDWNSVVCQQSATQRLEHAFNIARYQLGIEKLLDPEDVDTTYPDKKSILMYITSLFQVLPQQVSIEAIQEVEMLPRPPKVTKEEHFQLHHQMHYSQQITVSLAQGYERTSSPKPRFKSYAYTQAAYVTTSDPTRSPFPSQHLEAPEDKSFGSSLMESEVNLDRYQTALEEVLSWLLSAEDTLQAQGEISNDVEVVKDQFHTHEGYMMDLTAHQGRVGNILQLGSKLIGTGKLSEDEETEVQEQMNLLNSRWECLRVASMEKQSNLHRVLMDLQNQKLKELNDWLTKTEERTRKMEEEPLGPDLEDLKRQVQQHKVLQEDLEQEQVRVNSLTHMVVVVDESSGDHATAALEEQLKVLGDRWANICRWTEDRWVLLQDRFDRSVEKWRRFHYDIKIFNQWLTEAEQFLRKTQIPENWEHAKYKWYLKELQDGIGQRQTVVRTLNATGEEIIQQSSKTDASILQEKLGSLNLRWQEVCKQLSDRKKRLEEQKQPDLAPGLTTIGASPTQTVTLVTQPVVTKETAISKLEMPSSLMLEVPEETHRLLQQFPLDLEKFLAWLTEAETTANVLQDATRKERLLEDSKGVKELMKQWQDLQGEIEAHTDVYHNLDENSQKILRSLEGSDDAVLLQRRLDNMNFKWSELRKKSLNIRSHLEASSDQWKRLGPASQHFLSTSVQGPWERAISPNKVPYYINHETQTTCWDHPKMTELYQSLADLNNVRFSAYRTAMKLRRLQKALCLDLLSLSAACDALDQHNLKQNDQPMDILQIINCLTTIYDRLEQEHNNLVNVPLCVDMCLNWLLNVYDTGRTGRIRVLSFKTGIISLCKAHLEDKYRYLFKQVASSTGFCDQRRLGLLLHDSIQIPRQLGEVASFGGSNIEPSVRSCFQFANNKPEIEAALFLDWMRLEPQSMVWLPVLHRVAAAETAKHQAKCNICKECPIIGFRYRSLKHFNYDICQSCFFSGRVAKGHKMHYPMVEYCTPTTSGEDVRDFAKVLKNKFRTKRYFAKHPRMGYLPVQTVLEGDNMETPVTLINFWPVDSAPASSPQLSHDDTHSRIEHYASRLAEMENSNGSYLNDSISPNESIDDEHLLIQHYCQSLNQDSPLSQPRS

SEQ ID NO: 157 - protein, 1287 aa, synthetic construct
MLWWEEVEDCYEREDVQKKTFTKWVNAQFSKFGKQHIENLFSDLQDGRRLLDLLEGLTGQKLPKEKGSTRVHALNNVNKALRVLQNNNVDLVNIGSTDIVDGNHKLTLGLIWNIILHWQVKNVMKNIMAGLQQTNSEKILLSWVRQSTRNYPQVNVINFTTSWSDGLALNALIHSHRPDLFDWNSVVCQQSATQRLEHAFNIARYQLGIEKLLDPEDVDTTYPDKKSILMYITSLFQVLPQQVSIEAIQEVEMLPRPPKVTKEEHFQLHHQMHYSQQITVSLAQGYERTSSPKPRFKSYAYTQAAYVTTSDPTRSPFPSQHLEAPEDKSFGSSLMESEVNLDRYQTALEEVLSWLLSAEDTLQAQGEISNDVEVVKDQFHTHEGYMMDLTAHQGRVGNILQLGSKLIGTGKLSEDEETEVQEQMNLLNSRWECLRVASMEKQSNLHRVLMDRFDRSVEKWRRFHYDIKIFNQWLTEAEQFLRKTQIPENWEHAKYKWYLKELQDGIGQRQTVVRTLNATGEEIIQQSSKTDASILQEKLGSLNLRWQEVCKQLSDRKKRLEEQKQPDLAPGLTTIGASPTQTVTLVTQPVVTKETAISKLEMPSSLMLEVPKDSTQWLEAKEEAEQVLGQARAKLESWKEGPYTVDAIQKKITETKQLAKDLRQWQTNVDVANDLALKLLRDYSADDTRKVHMITENINASWRSIHKRVSEREAALEETHRLLQQFPLDLEKFLAWLTEAETTANVLQDATRKERLLEDSKGVKELMKQWQDLQGEIEAHTDVYHNLDENSQKILRSLEGSDDAVLLQRRLDNMNFKWSELRKKSLNIRSHLEASSDQWKRLGPASQHFLSTSVQGPWERAISPNKVPYYINHETQTTCWDHPKMTELYQSLADLNNVRFSAYRTAMKLRRLQKALCLDLLSLSAACDALDQHNLKQNDQPMDILQIINCLTTIYDRLEQEHNNLVNVPLCVDMCLNWLLNVYDTGRTGRIRVLSFKTGIISLCKAHLEDKYRYLFKQVASSTGFCDQRRLGLLLHDSIQIPRQLGEVASFGGSNIEPSVRSCFQFANNKPEIEAALFLDWMRLEPQSMVWLPVLHRVAAAETAKHQAKCNICKECPIIGFRYRSLKHFNYDICQSCFFSGRVAKGHKMHYPMVEYCTPTTSGEDVRDFAKVLKNKFRTKRYFAKHPRMGYLPVQTVLEGDNMETPVTLINFWPVDSAPASSPQLSHDDTHSRIEHYASRLAEMENSNGSYLNDSISPNESIDDEHLLIQHYCQSLNQDSPLSQPRS

SEQ ID NO: 158 - protein, 1350 aa, synthetic construct
MLWWEEVEDCYEREDVQKKTFTKWVNAQFSKFGKQHIENLFSDLQDGRRLLDLLEGLTGQKLPKEKGSTRVHALNNVNKALRVLQNNNVDLVNIGSTDIVDGNHKLTLGLIWNIILHWQVKNVMKNIMAGLQQTNSEKILLSWVRQSTRNYPQVNVINFTTSWSDGLALNALIHSHRPDLFDWNSVVCQQSATQRLEHAFNIARYQLGIEKLLDPEDVDTTYPDKKSILMYITSLFQVLPQQVSIEAIQEVEMLPRPPKVTKEEHFQLHHQMHYSQQITVSLAQGYERTSSPKPRFKSYAYTQAAYVTTSDPTRSPFPSQHLEAPEDKSFGSSLMESEVNLDRYQTALEEVLSWLLSAEDTLQAQGEISNDVEVVKDQFHTHEGYMMDLTAHQGRVGNILQLGSKLIGTGKLSEDEETEVQEQMNLLNSRWECLRVASMEKQSNLHRVLMDLQNQKLKELNDWLTKTEERTRKMEEEPLGPDLEDLKRQVQQHKVLQEDLEQEQVRVNSLTHMVVVVDESSGDHATAALEEQLKVLGDRWANICRWTEDRWVLLQDRFDRSVEKWRRFHYDIKIFNQWLTEAEQFLRKTQIPENWEHAKYKWYLKELQDGIGQRQTVVRTLNATGEEIIQQSSKTDASILQEKLGSLNLRWQEVCKQLSDRKKRLEEQKQPDLAPGLTTIGASPTQTVTLVTQPVVTKETAISKLEMPSSLMLEVPEETHRLLQQFPLDLEKFLAWLTEAETTANVLQDATRKERLLEDSKGVKELMKQWQDLQGEIEAHTDVYHNLDENSQKILRSLEGSDDAVLLQRRLDNMNFKWSELRKKSLNIRSHLEASSDQWKRLGPASQHFLSTSVQGPWERAISPNKVPYYINHETQTTCWDHPKMTELYQSLADLNNVRFSAYRTAMKLRRLQKALCLDLLSLSAACDALDQHNLKQNDQPMDILQIINCLTTIYDRLEQEHNNLVNVPLCVDMCLNWLLNVYDTGRTGRIRVLSFKTGIISLCKAHLEDKYRYLFKQVASSTGFCDQRRLGLLLHDSIQIPRQLGEVASFGGSNIEPSVRSCFQFANNKPEIEAALFLDWMRLEPQSMVWLPVLHRVAAAETAKHQAKCNICKECPIIGFRYRSLKHFNYDICQSCFFSGRVAKGHKMHYPMVEYCTPTTSGEDVRDFAKVLKNKFRTKRYFAKHPRMGYLPVQTVLEGDNMETPVTLINFWPVDSAPASSPQLSHDDTHSRIEHYASRLAEMENSNGSYLNDSISPNESIDDEHLLIQHYCQSLNQDSPLSQPRSPAQILISLESEERGELERILADLEEENRNLQAEYDRLKQQHEHKGLSPLPSPPEMMPTSPQSP

SEQ ID NO: 159 - protein, 1350 aa, synthetic construct
MLWWEEVEDCYEREDVQKKTFTKWVNAQFSKFGKQHIENLFSDLQDGRRLLDLLEGLTGQKLPKEKGSTRVHALNNVNKALRVLQNNNVDLVNIGSTDIVDGNHKLTLGLIWNIILHWQVKNVMKNIMAGLQQTNSEKILLSWVRQSTRNYPQVNVINFTTSWSDGLALNALIHSHRPDLFDWNSVVCQQSATQRLEHAFNIARYQLGIEKLLDPEDVDTTYPDKKSILMYITSLFQVLPQQVSIEAIQEVEMLPRPPKVTKEEHFQLHHQMHYSQQITVSLAQGYERTSSPKPRFKSYAYTQAAYVTTSDPTRSPFPSQHLEAPEDKSFGSSLMESEVNLDRYQTALEEVLSWLLSAEDTLQAQGEISNDVEVVKDQFHTHEGYMMDLTAHQGRVGNILQLGSKLIGTGKLSEDEETEVQEQMNLLNSRWECLRVASMEKQSNLHRVLMDRFDRSVEKWRRFHYDIKIFNQWLTEAEQFLRKTQIPENWEHAKYKWYLKELQDGIGQRQTVVRTLNATGEEIIQQSSKTDASILQEKLGSLNLRWQEVCKQLSDRKKRLEEQKQPDLAPGLTTIGASPTQTVTLVTQPVVTKETAISKLEMPSSLMLEVPKDSTQWLEAKEEAEQVLGQARAKLESWKEGPYTVDAIQKKITETKQLAKDLRQWQTNVDVANDLALKLLRDYSADDTRKVHMITENINASWRSIHKRVSEREAALEETHRLLQQFPLDLEKFLAWLTEAETTANVLQDATRKERLLEDSKGVKELMKQWQDLQGEIEAHTDVYHNLDENSQKILRSLEGSDDAVLLQRRLDNMNFKWSELRKKSLNIRSHLEASSDQWKRLGPASQHFLSTSVQGPWERAISPNKVPYYINHETQTTCWDHPKMTELYQSLADLNNVRFSAYRTAMKLRRLQKALCLDLLSLSAACDALDQHNLKQNDQPMDILQIINCLTTIYDRLEQEHNNLVNVPLCVDMCLNWLLNVYDTGRTGRIRVLSFKTGIISLCKAHLEDKYRYLFKQVASSTGFCDQRRLGLLLHDSIQIPRQLGEVASFGGSNIEPSVRSCFQFANNKPEIEAALFLDWMRLEPQSMVWLPVLHRVAAAETAKHQAKCNICKECPIIGFRYRSLKHFNYDICQSCFFSGRVAKGHKMHYPMVEYCTPTTSGEDVRDFAKVLKNKFRTKRYFAKHPRMGYLPVQTVLEGDNMETPVTLINFWPVDSAPASSPQLSHDDTHSRIEHYASRLAEMENSNGSYLNDSISPNESIDDEHLLIQHYCQSLNQDSPLSQPRSPAQILISLESEERGELERILADLEEENRNLQAEYDRLKQQHEHKGLSPLPSPPEMMPTSPQSP

SEQ ID NO: 160 - protein, 1345 aa, synthetic construct
MLWWEEVEDCYEREDVQKKTFTKWVNAQFSKFGKQHIENLFSDLQDGRRLLDLLEGLTGQKLPKEKGSTRVHALNNVNKALRVLQNNNVDLVNIGSTDIVDGNHKLTLGLIWNIILHWQVKNVMKNIMAGLQQTNSEKILLSWVRQSTRNYPQVNVINFTTSWSDGLALNALIHSHRPDLFDWNSVVCQQSATQRLEHAFNIARYQLGIEKLLDPEDVDTTYPDKKSILMYITSLFQVLPQQVSIEAIQEVEMLPRPPKVTKEEHFQLHHQMHYSQQITVSLAQGYERTSSPKPRFKSYAYTQAAYVTTSDPTRSPFPSQHLEAPEDKSFGSSLMESEVNLDRYQTALEEVLSWLLSAEDTLQAQGEISNDVEVVKDQFHTHEGYMMDLTAHQGRVGNILQLGSKLIGTGKLSEDEETEVQEQMNLLNSRWECLRVASMEKQSNLHRVLMDLQNQKLKELNDWLTKTEERTRKMEEEPLGPDLEDLKRQVQQHKVLQEDLEQEQVRVNSLTHMVVVVDESSGDHATAALEEQLKVLGDRWANICRWTEDRWVLLQDRFDRSVEKWRRFHYDIKIFNQWLTEAEQFLRKTQIPENWEHAKYKWYLKELQDGIGQRQTVVRTLNATGEEIIQQSSKTDASILQEKLGSLNLRWQEVCKQLSDRKKRLEEQKKDSTQWLEAKEEAEQVLGQARAKLESWKEGPYTVDAIQKKITETKQLAKDLRQWQTNVDVANDLALKLLRDYSADDTRKVHMITENINASWRSIHKRVSEREAALEETHRLLQQFPLDLEKFLAWLTEAETTANVLQDATRKERLLEDSKGVKELMKQWQDLQGEIEAHTDVYHNLDENSQKILRSLEGSDDAVLLQRRLDNMNFKWSELRKKSLNIRSHLEASSDQWKRLGPASQHFLSTSVQGPWERAISPNKVPYYINHETQTTCWDHPKMTELYQSLADLNNVRFSAYRTAMKLRRLQKALCLDLLSLSAACDALDQHNLKQNDQPMDILQIINCLTTIYDRLEQEHNNLVNVPLCVDMCLNWLLNVYDTGRTGRIRVLSFKTGIISLCKAHLEDKYRYLFKQVASSTGFCDQRRLGLLLHDSIQIPRQLGEVASFGGSNIEPSVRSCFQFANNKPEIEAALFLDWMRLEPQSMVWLPVLHRVAAAETAKHQAKCNICKECPIIGFRYRSLKHFNYDICQSCFFSGRVAKGHKMHYPMVEYCTPTTSGEDVRDFAKVLKNKFRTKRYFAKHPRMGYLPVQTVLEGDNMETPVTLINFWPVDSAPASSPQLSHDDTHSRIEHYASRLAEMENSNGSYLNDSISPNESIDDEHLLIQHYCQSLNQDSPLSQPRS

SEQ ID NO: 161 - protein, 1262 aa, synthetic construct
MAKYGEHEASPDNGQNEFSDIIKSRSDEHNDVQKKTFTKWINARFSKSGKPPINDMFTDLKDGRKLLDLLEGLTGTSLPKERGSTRVHALNNVNRVLQVLHQNNVELVNIGGTDIVDGNHKLTLGLLWSIILHWQVKDVMKDVMSDLQQTNSEKILLSWVRQTTRPYSQVNVLNFTTSWTDGLAFNAVLHRHKPDLFSWDKVVKMSPIERLEHAFSKAQTYLGIEKLLDPEDVAVQLPDKKSIIMYLTSLFEVLPQQVTIDAIREVETLPRKYKKECEEEAINIQSTAPEEEHESPRAETPSTVTEVDMDLDSYQIALEEVLTWLLSAEDTFQEQDDISDDVEEVKDQFATHEAFMMELTAHQSSVGSVLQAGNQLITQGTLSDEEEFEIQEQMTLLNARWEALRVESMDRQSRLHDVLMELQKKQLQQLSAWLTLTEERIQKMETCPLDDDVKSLQKLLEEHKSLQSDLEAEQVKVNSLTHMVVIVDENSGESATAILEDQLQKLGERWTAVCRWTEERWNRLQEIAASARFDRSVEKWRRFHYDIKIFNQWLTEAEQFLRKTQIPENWEHAKYKWYLKELQDGIGQRQTVVRTLNATGEEIIQQSSKTDASILQEKLGSLNLRWQEVCKQLSDRKKRLEEQKQPDLAPGLTTIGASPTQTVTLVTQPVVTKETAISKLEMPSSLMLEVPEETHRLLQQFPLDLEKFLAWLTEAETTANVLQDATRKERLLEDSKGVKELMKQWQDLQGEIEAHTDVYHNLDENSQKILRSLEGSDDAVLLQRRLDNMNFKWSELRKKSLNIRSHLEASSDQWKRLGPASQHFLSTSVQGPWERAISPNKVPYYINHETQTTCWDHPKMTELYQSLADLNNVRFSAYRTAMKLRRLQKALCLDLLSLSAACDALDQHNLKQNDQPMDILQIINCLTTIYDRLEQEHNNLVNVPLCVDMCLNWLLNVYDTGRTGRIRVLSFKTGIISLCKAHLEDKYRYLFKQVASSTGFCDQRRLGLLLHDSIQIPRQLGEVASFGGSNIEPSVRSCFQFANNKPEIEAALFLDWMRLEPQSMVWLPVLHRVAAAETAKHQAKCNICKECPIIGFRYRSLKHFNYDICQSCFFSGRVAKGHKMHYPMVEYCTPTTSGEDVRDFAKVLKNKFRTKRYFAKHPRMGYLPVQTVLEGDNMETPVTLINFWPVDSAPASSPQLSHDDTHSRIEHYASRLAEMENSNGSYLNDSISPNESIDDEHLLIQHYCQSLNQDSPLSQPRS

SEQ ID NO: 162 - protein, 1260 aa, synthetic construct
MAKYGEHEASPDNGQNEFSDIIKSRSDEHNDVQKKTFTKWINARFSKSGKPPINDMFTDLKDGRKLLDLLEGLTGTSLPKERGSTRVHALNNVNRVLQVLHQNNVELVNIGGTDIVDGNHKLTLGLLWSIILHWQVKDVMKDVMSDLQQTNSEKILLSWVRQTTRPYSQVNVLNFTTSWTDGLAFNAVLHRHKPDLFSWDKVVKMSPIERLEHAFSKAQTYLGIEKLLDPEDVAVQLPDKKSIIMYLTSLFEVLPQQVTIDAIREVETLPRKYKKECEEEAINIQSTAPEEEHESPRAETPSTVTEVDMDLDSYQIALEEVLTWLLSAEDTFQEQDDISDDVEEVKDQFATHEAFMMELTAHQSSVGSVLQAGNQLITQGTLSDEEEFEIQEQMTLLNARWEALRVESMDRQSRLHDVLMAASARFDRSVEKWRRFHYDIKIFNQWLTEAEQFLRKTQIPENWEHAKYKWYLKELQDGIGQRQTVVRTLNATGEEIIQQSSKTDASILQEKLGSLNLRWQEVCKQLSDRKKRLEEQKQPDLAPGLTTIGASPTQTVTLVTQPVVTKETAISKLEMPSSLMLEVPKDSTQWLEAKEEAEQVLGQARAKLESWKEGPYTVDAIQKKITETKQLAKDLRQWQTNVDVANDLALKLLRDYSADDTRKVHMITENINASWRSIHKRVSEREAALEETHRLLQQFPLDLEKFLAWLTEAETTANVLQDATRKERLLEDSKGVKELMKQWQDLQGEIEAHTDVYHNLDENSQKILRSLEGSDDAVLLQRRLDNMNFKWSELRKKSLNIRSHLEASSDQWKRLGPASQHFLSTSVQGPWERAISPNKVPYYINHETQTTCWDHPKMTELYQSLADLNNVRFSAYRTAMKLRRLQKALCLDLLSLSAACDALDQHNLKQNDQPMDILQIINCLTTIYDRLEQEHNNLVNVPLCVDMCLNWLLNVYDTGRTGRIRVLSFKTGIISLCKAHLEDKYRYLFKQVASSTGFCDQRRLGLLLHDSIQIPRQLGEVASFGGSNIEPSVRSCFQFANNKPEIEAALFLDWMRLEPQSMVWLPVLHRVAAAETAKHQAKCNICKECPIIGFRYRSLKHFNYDICQSCFFSGRVAKGHKMHYPMVEYCTPTTSGEDVRDFAKVLKNKFRTKRYFAKHPRMGYLPVQTVLEGDNMETPVTLINFWPVDSAPASSPQLSHDDTHSRIEHYASRLAEMENSNGSYLNDSISPNESIDDEHLLIQHYCQSLNQDSPLSQPRS

SEQ ID NO: 163 - protein, 1325 aa, synthetic construct
MAKYGEHEASPDNGQNEFSDIIKSRSDEHNDVQKKTFTKWINARFSKSGKPPINDMFTDLKDGRKLLDLLEGLTGTSLPKERGSTRVHALNNVNRVLQVLHQNNVELVNIGGTDIVDGNHKLTLGLLWSIILHWQVKDVMKDVMSDLQQTNSEKILLSWVRQTTRPYSQVNVLNFTTSWTDGLAFNAVLHRHKPDLFSWDKVVKMSPIERLEHAFSKAQTYLGIEKLLDPEDVAVQLPDKKSIIMYLTSLFEVLPQQVTIDAIREVETLPRKYKKECEEEAINIQSTAPEEEHESPRAETPSTVTEVDMDLDSYQIALEEVLTWLLSAEDTFQEQDDISDDVEEVKDQFATHEAFMMELTAHQSSVGSVLQAGNQLITQGTLSDEEEFEIQEQMTLLNARWEALRVESMDRQSRLHDVLMELQKKQLQQLSAWLTLTEERIQKMETCPLDDDVKSLQKLLEEHKSLQSDLEAEQVKVNSLTHMVVIVDENSGESATAILEDQLQKLGERWTAVCRWTEERWNRLQEIAASARFDRSVEKWRRFHYDIKIFNQWLTEAEQFLRKTQIPENWEHAKYKWYLKELQDGIGQRQTVVRTLNATGEEIIQQSSKTDASILQEKLGSLNLRWQEVCKQLSDRKKRLEEQKQPDLAPGLTTIGASPTQTVTLVTQPVVTKETAISKLEMPSSLMLEVPEETHRLLQQFPLDLEKFLAWLTEAETTANVLQDATRKERLLEDSKGVKELMKQWQDLQGEIEAHTDVYHNLDENSQKILRSLEGSDDAVLLQRRLDNMNFKWSELRKKSLNIRSHLEASSDQWKRLGPASQHFLSTSVQGPWERAISPNKVPYYINHETQTTCWDHPKMTELYQSLADLNNVRFSAYRTAMKLRRLQKALCLDLLSLSAACDALDQHNLKQNDQPMDILQIINCLTTIYDRLEQEHNNLVNVPLCVDMCLNWLLNVYDTGRTGRIRVLSFKTGIISLCKAHLEDKYRYLFKQVASSTGFCDQRRLGLLLHDSIQIPRQLGEVASFGGSNIEPSVRSCFQFANNKPEIEAALFLDWMRLEPQSMVWLPVLHRVAAAETAKHQAKCNICKECPIIGFRYRSLKHFNYDICQSCFFSGRVAKGHKMHYPMVEYCTPTTSGEDVRDFAKVLKNKFRTKRYFAKHPRMGYLPVQTVLEGDNMETPVTLINFWPVDSAPASSPQLSHDDTHSRIEHYASRLAEMENSNGSYLNDSISPNESIDDEHLLIQHYCQSLNQDSPLSQPRSPAQILISLESEERGELERILADLEEENRNLQAEYDRLKQQHEHKGLSPLPSPPEMMPTSPQSP

SEQ ID NO: 164 - protein, 1323 aa, synthetic construct
MAKYGEHEASPDNGQNEFSDIIKSRSDEHNDVQKKTFTKWINARFSKSGKPPINDMFTDLKDGRKLLDLLEGLTGTSLPKERGSTRVHALNNVNRVLQVLHQNNVELVNIGGTDIVDGNHKLTLGLLWSIILHWQVKDVMKDVMSDLQQTNSEKILLSWVRQTTRPYSQVNVLNFTTSWTDGLAFNAVLHRHKPDLFSWDKVVKMSPIERLEHAFSKAQTYLGIEKLLDPEDVAVQLPDKKSIIMYLTSLFEVLPQQVTIDAIREVETLPRKYKKECEEEAINIQSTAPEEEHESPRAETPSTVTEVDMDLDSYQIALEEVLTWLLSAEDTFQEQDDISDDVEEVKDQFATHEAFMMELTAHQSSVGSVLQAGNQLITQGTLSDEEEFEIQEQMTLLNARWEALRVESMDRQSRLHDVLMAASARFDRSVEKWRRFHYDIKIFNQWLTEAEQFLRKTQIPENWEHAKYKWYLKELQDGIGQRQTVVRTLNATGEEIIQQSSKTDASILQEKLGSLNLRWQEVCKQLSDRKKRLEEQKQPDLAPGLTTIGASPTQTVTLVTQPVVTKETAISKLEMPSSLMLEVPKDSTQWLEAKEEAEQVLGQARAKLESWKEGPYTVDAIQKKITETKQLAKDLRQWQTNVDVANDLALKLLRDYSADDTRKVHMITENINASWRSIHKRVSEREAALEETHRLLQQFPLDLEKFLAWLTEAETTANVLQDATRKERLLEDSKGVKELMKQWQDLQGEIEAHTDVYHNLDENSQKILRSLEGSDDAVLLQRRLDNMNFKWSELRKKSLNIRSHLEASSDQWKRLGPASQHFLSTSVQGPWERAISPNKVPYYINHETQTTCWDHPKMTELYQSLADLNNVRFSAYRTAMKLRRLQKALCLDLLSLSAACDALDQHNLKQNDQPMDILQIINCLTTIYDRLEQEHNNLVNVPLCVDMCLNWLLNVYDTGRTGRIRVLSFKTGIISLCKAHLEDKYRYLFKQVASSTGFCDQRRLGLLLHDSIQIPRQLGEVASFGGSNIEPSVRSCFQFANNKPEIEAALFLDWMRLEPQSMVWLPVLHRVAAAETAKHQAKCNICKECPIIGFRYRSLKHFNYDICQSCFFSGRVAKGHKMHYPMVEYCTPTTSGEDVRDFAKVLKNKFRTKRYFAKHPRMGYLPVQTVLEGDNMETPVTLINFWPVDSAPASSPQLSHDDTHSRIEHYASRLAEMENSNGSYLNDSISPNESIDDEHLLIQHYCQSLNQDSPLSQPRSPAQILISLESEERGELERILADLEEENRNLQAEYDRLKQQHEHKGLSPLPSPPEMMPTSPQSP

SEQ ID NO: 165 - protein, 1320 aa, synthetic construct
MAKYGEHEASPDNGQNEFSDIIKSRSDEHNDVQKKTFTKWINARFSKSGKPPINDMFTDLKDGRKLLDLLEGLTGTSLPKERGSTRVHALNNVNRVLQVLHQNNVELVNIGGTDIVDGNHKLTLGLLWSIILHWQVKDVMKDVMSDLQQTNSEKILLSWVRQTTRPYSQVNVLNFTTSWTDGLAFNAVLHRHKPDLFSWDKVVKMSPIERLEHAFSKAQTYLGIEKLLDPEDVAVQLPDKKSIIMYLTSLFEVLPQQVTIDAIREVETLPRKYKKECEEEAINIQSTAPEEEHESPRAETPSTVTEVDMDLDSYQIALEEVLTWLLSAEDTFQEQDDISDDVEEVKDQFATHEAFMMELTAHQSSVGSVLQAGNQLITQGTLSDEEEFEIQEQMTLLNARWEALRVESMDRQSRLHDVLMELQKKQLQQLSAWLTLTEERIQKMETCPLDDDVKSLQKLLEEHKSLQSDLEAEQVKVNSLTHMVVIVDENSGESATAILEDQLQKLGERWTAVCRWTEERWNRLQEIAASARFDRSVEKWRRFHYDIKIFNQWLTEAEQFLRKTQIPENWEHAKYKWYLKELQDGIGQRQTVVRTLNATGEEIIQQSSKTDASILQEKLGSLNLRWQEVCKQLSDRKKRLEEQKKDSTQWLEAKEEAEQVLGQARAKLESWKEGPYTVDAIQKKITETKQLAKDLRQWQTNVDVANDLALKLLRDYSADDTRKVHMITENINASWRSIHKRVSEREAALEETHRLLQQFPLDLEKFLAWLTEAETTANVLQDATRKERLLEDSKGVKELMKQWQDLQGEIEAHTDVYHNLDENSQKILRSLEGSDDAVLLQRRLDNMNFKWSELRKKSLNIRSHLEASSDQWKRLGPASQHFLSTSVQGPWERAISPNKVPYYINHETQTTCWDHPKMTELYQSLADLNNVRFSAYRTAMKLRRLQKALCLDLLSLSAACDALDQHNLKQNDQPMDILQIINCLTTIYDRLEQEHNNLVNVPLCVDMCLNWLLNVYDTGRTGRIRVLSFKTGIISLCKAHLEDKYRYLFKQVASSTGFCDQRRLGLLLHDSIQIPRQLGEVASFGGSNIEPSVRSCFQFANNKPEIEAALFLDWMRLEPQSMVWLPVLHRVAAAETAKHQAKCNICKECPIIGFRYRSLKHFNYDICQSCFFSGRVAKGHKMHYPMVEYCTPTTSGEDVRDFAKVLKNKFRTKRYFAKHPRMGYLPVQTVLEGDNMETPVTLINFWPVDSAPASSPQLSHDDTHSRIEHYASRLAEMENSNGSYLNDSISPNESIDDEHLLIQHYCQSLNQDSPLSQPRS

SEQ ID NO: 166 - DNA, 3861 bp, Homo sapiens
  source 1..3861: mol_type = genomic DNA
atgctttggtgggaagaagtagaggactgttatgaaagagaagatgttcaaaagaaaacattcacaaaatgggtaaatgcacaattttctaagtttgggaagcagcatattgagaacctcttcagtgacctacaggatgggaggcgcctcctagacctcctcgaaggcctgacagggcaaaaactgccaaaagaaaaaggatccacaagagttcatgccctgaacaatgtcaacaaggcactgcgggttttgcagaacaataatgttgatttagtgaatattggaagtactgacatcgtagatggaaatcataaactgactcttggtttgatttggaatataatcctccactggcaggtcaaaaatgtaatgaaaaatatcatggctggattgcaacaaaccaacagtgaaaagattctcctgagctgggtccgacaatcaactcgtaattatccacaggttaatgtaatcaacttcaccaccagctggtctgatggcctggctttgaatgctctcatccatagtcataggccagacctatttgactggaatagtgtggtttgccagcagtcagccacacaacgactggaacatgcattcaacatcgccagatatcaattaggcatagagaaactactcgatcctgaagatgttgataccacctatccagataagaagtccatcttaatgtacatcacatcactcttccaagttttgcctcaacaagtgagcattgaagccatccaggaagtggaaatgttgccaaggccacctaaagtgactaaagaagaacattttcagttacatcatcaaatgcactattctcaacagatcacggtcagtctagcacagggatatgagagaacttcttcccctaagcctcgattcaagagctatgcctacacacaggctgcttatgtcaccacctctgaccctacacggagcccatttccttcacagcatttggaagctcctgaagacaagtcatttggcagttcattgatggagagtgaagtaaacctggaccgttatcaaacagctttagaagaagtattatcgtggcttctttctgctgaggacacattgcaagcacaaggagagatttctaatgatgtggaagtggtgaaagaccagtttcatactcatgaggggtacatgatggatttgacagcccatcagggccgggttggtaatattctacaattgggaagtaagctgattggaacaggaaaattatcagaagatgaagaaactgaagtacaagagcagatgaatctcctaaattcaagatgggaatgcctcagggtagctagcatggaaaaacaaagcaatttacatagagttttaatggatctccagaatcagaaactgaaagagttgaatgactggctaacaaaaacagaagaaagaacaaggaaaatggaggaagagcctcttggacctgatcttgaagacctaaaacgccaagtacaacaacataaggtgcttcaagaagatctagaacaagaacaagtcagggtcaattctctcactcacatggtggtggtagttgatgaatctagtggagatcacgcaactgctgctttggaagaacaacttaaggtattgggagatcgatgggcaaacatctgtagatggacagaagaccgctgggttcttttacaagaccgatttgacagatctgttgagaaatggcggcgttttcattatgatataaagatatttaatcagtggctaacagaagctgaacagtttctcagaaagacacaaattcctgagaattgggaacatgctaaatacaaatggtatcttaaggaactccaggatggcattgggcagcggcaaactgttgtcagaacattgaatgcaactggggaagaaataattcagcaatcctcaaaaacagatgccagtattctacaggaaaaattgggaagcctgaatctgcggtggcaggaggtctgcaaacagctgtcagacagaaaaaagaggctagaagaacaaaagcagcctgacctagctcctggactgaccactattggagcctctcctactcagactgttactctggtgacacaacctgtggttactaaggaaactgccatctccaaactagaaatgccatcttccttgatgttggaggtacctgaagaaactcatagattactgcaacagttccccctggacctggaaaagtttcttgcctggcttacagaagctgaaacaactgccaatgtcctacaggatgctacccgtaaggaaaggctcctagaagactccaagggagtaaaagagctgatgaaacaatggcaagacctccaaggtgaaattgaagctcacacagatgtttatcacaacctggatgaaaacagccaaaaaatcctgagatccctggaaggttccgatgatgcagtcctgttacaaagacgtttggataacatgaacttcaagtggagtgaacttcggaaaaagtctctcaacattaggtcccatttggaagccagttctgaccagtggaagcgtctgggtccagcatctcagcactttctttccacgtctgtccagggtccctgggagagagccatctcgccaaacaaagtgccctactatatcaaccacgagactcaaacaacttgctgggaccatcccaaaatgacagagctctaccagtctttagctgacctgaataatgtcagattctcagcttataggactgccatgaaactccgaagactgcagaaggccctttgcttggatctcttgagcctgtcagctgcatgtgatgccttggaccagcacaacctcaagcaaaatgaccagcccatggatatcctgcagattattaattgtttgaccactatttatgaccgcctggagcaagagcacaacaatttggtcaacgtccctctctgcgtggatatgtgtctgaactggctgctgaatgtttatgatacgggacgaacagggaggatccgtgtcctgtcttttaaaactggcatcatttccctgtgtaaagcacatttggaagacaagtacagataccttttcaagcaagtggcaagttcaacaggattttgtgaccagcgcaggctgggcctccttctgcatgattctatccaaattccaagacagttgggtgaagttgcatcctttgggggcagtaacattgagccaagtgtccggagctgcttccaatttgctaataataagccagagatcgaagcggccctcttcctagactggatgagactggaaccccagtccatggtgtggctgcccgtcctgcacagagtggctgctgcagaaactgccaagcatcaggccaaatgtaacatctgcaaagagtgtccaatcattggattcaggtacaggagtctaaagcactttaattatgacatctgccaaagctgctttttttctggtcgagttgcaaaaggccataaaatgcactatcccatggtggaatattgcactccgactacatcaggagaagatgttcgagactttgccaaggtactaaaaaacaaatttcgaaccaaaaggtattttgcgaagcatccccgaatgggctacctgccagtgcagactgtcttagagggggacaacatggaaactcccgttactctgatcaacttctggccagtagattctgcgcctgcctcgtcccctcagctttcacacgatgatactcattcacgcattgaacattatgctagcaggctagcagaaatggaaaacagcaatggatcttatctaaatgatagcatctctcctaatgagagcatagatgatgaacatttgttaatccagcattactgccaaagtttgaaccaggactcccccctgagccagcctcgtagt

SEQ ID NO: 167 - DNA, 3861 bp, synthetic construct
  source 1..3861: mol_type = other DNA
atgctgtggtgggaggaggtggaggactgctacgagcgggaggacgtgcagaagaagaccttcaccaagtgggtgaacgcccagttcagcaagttcggcaagcagcacatcgagaacctgttcagcgacctgcaggacggccggcggctgctggacctgctggagggcctgaccggccagaagctgcccaaggagaagggcagcacccgggtgcacgccctgaacaacgtgaacaaggccctgcgggtgctgcagaacaacaacgtggacctggtgaacatcggcagcaccgacatcgtggacggcaaccacaagctgaccctgggcctgatctggaacatcatcctgcactggcaggtgaagaacgtgatgaagaacatcatggccggcctgcagcagaccaacagcgagaagatcctgctgagctgggtgcggcagagcacccggaactacccccaggtgaacgtgatcaacttcaccaccagctggagcgacggcctggccctgaacgccctgatccacagccaccggcccgacctgttcgactggaacagcgtggtgtgccagcagagcgccacccagcggctggagcacgccttcaacatcgcccggtaccagctgggcatcgagaagctgctggaccccgaggacgtggacaccacctaccccgacaagaagagcatcctgatgtacatcaccagcctgttccaggtgctgccccagcaggtgagcatcgaggccatccaggaggtggagatgctgccccggccccccaaggtgaccaaggaggagcacttccagctgcaccaccagatgcactacagccagcagatcaccgtgagcctggcccagggctacgagcggaccagcagccccaagccccggttcaagagctacgcctacacccaggccgcctacgtgaccaccagcgaccccacccggagccccttccccagccagcacctggaggcccccgaggacaagagcttcggcagcagcctgatggagagcgaggtgaacctggaccggtaccagaccgccctggaggaggtgctgagctggctgctgagcgccgaggacaccctgcaggcccagggcgagatcagcaacgacgtggaggtggtgaaggaccagttccacacccacgagggctacatgatggacctgaccgcccaccagggccgggtgggcaacatcctgcagctgggcagcaagctgatcggcaccggcaagctgagcgaggacgaggagaccgaggtgcaggagcagatgaacctgctgaacagccggtgggagtgcctgcgggtggccagcatggagaagcagagcaacctgcaccgggtgctgatggacctgcagaaccagaagctgaaggagctgaacgactggctgaccaagaccgaggagcggacccggaagatggaggaggagcccctgggccccgacctggaggacctgaagcggcaggtgcagcagcacaaggtgctgcaggaggacctggagcaggagcaggtgcgggtgaacagcctgacccacatggtggtggtggtggacgagagcagcggcgaccacgccaccgccgccctggaggagcagctgaaggtgctgggcgaccggtgggccaacatctgccggtggaccgaggaccggtgggtgctgctgcaggaccggttcgaccggagcgtggagaagtggcggcggttccactacgacatcaagatcttcaaccagtggctgaccgaggccgagcagttcctgcggaagacccagatccccgagaactgggagcacgccaagtacaagtggtacctgaaggagctgcaggacggcatcggccagcggcagaccgtggtgcggaccctgaacgccaccggcgaggagatcatccagcagagcagcaagaccgacgccagcatcctgcaggagaagctgggcagcctgaacctgcggtggcaggaggtgtgcaagcagctgagcgaccggaagaagcggctggaggagcagaagcagcccgacctggcccccggcctgaccaccatcggcgccagccccacccagaccgtgaccctggtgacccagcccgtggtgaccaaggagaccgccatcagcaagctggagatgcccagcagcctgatgctggaggtgcccgaggagacccaccggctgctgcagcagttccccctggacctggagaagttcctggcctggctgaccgaggccgagaccaccgccaacgtgctgcaggacgccacccggaaggagcggctgctggaggacagcaagggcgtgaaggagctgatgaagcagtggcaggacctgcagggcgagatcgaggcccacaccgacgtgtaccacaacctggacgagaacagccagaagatcctgcggagcctggagggcagcgacgacgccgtgctgctgcagcggcggctggacaacatgaacttcaagtggagcgagctgcggaagaagagcctgaacatccggagccacctggaggccagcagcgaccagtggaagcggctgggccccgccagccagcacttcctgagcaccagcgtgcagggcccctgggagcgggccatcagccccaacaaggtgccctactacatcaaccacgagacccagaccacctgctgggaccaccccaagatgaccgagctgtaccagagcctggccgacctgaacaacgtgcggttcagcgcctaccggaccgccatgaagctgcggcggctgcagaaggccctgtgcctggacctgctgagcctgagcgccgcctgcgacgccctggaccagcacaacctgaagcagaacgaccagcccatggacatcctgcagatcatcaactgcctgaccaccatctacgaccggctggagcaggagcacaacaacctggtgaacgtgcccctgtgcgtggacatgtgcctgaactggctgctgaacgtgtacgacaccggccggaccggccggatccgggtgctgagcttcaagaccggcatcatcagcctgtgcaaggcccacctggaggacaagtaccggtacctgttcaagcaggtggccagcagcaccggcttctgcgaccagcggcggctgggcctgctgctgcacgacagcatccagatcccccggcagctgggcgaggtggccagcttcggcggcagcaacatcgagcccagcgtgcggagctgcttccagttcgccaacaacaagcccgagatcgaggccgccctgttcctggactggatgcggctggagccccagagcatggtgtggctgcccgtgctgcaccgggtggccgccgccgagaccgccaagcaccaggccaagtgcaacatctgcaaggagtgccccatcatcggcttccggtaccggagcctgaagcacttcaactacgacatctgccagagctgcttcttcagcggccgggtggccaagggccacaagatgcactaccccatggtggagtactgcacccccaccaccagcggcgaggacgtgcgggacttcgccaaggtgctgaagaacaagttccggaccaagcggtacttcgccaagcacccccggatgggctacctgcccgtgcagaccgtgctggagggcgacaacatggagacccccgtgaccctgatcaacttctggcccgtggacagcgcccccgccagcagcccccagctgagccacgacgacacccacagccggatcgagcactacgccagccggctggccgagatggagaacagcaacggcagctacctgaacgacagcatcagccccaacgagagcatcgacgacgagcacctgctgatccagcactactgccagagcctgaaccaggacagccccctgagccagccccggagc

SEQ ID NO: 168 - DNA, 3861 bp, Homo sapiens
  source 1..3861: mol_type = genomic DNA
atgctttggtgggaagaagtagaggactgttatgaaagagaagatgttcaaaagaaaacattcacaaaatgggtaaatgcacaattttctaagtttgggaagcagcatattgagaacctcttcagtgacctacaggatgggaggcgcctcctagacctcctcgaaggcctgacagggcaaaaactgccaaaagaaaaaggatccacaagagttcatgccctgaacaatgtcaacaaggcactgcgggttttgcagaacaataatgttgatttagtgaatattggaagtactgacatcgtagatggaaatcataaactgactcttggtttgatttggaatataatcctccactggcaggtcaaaaatgtaatgaaaaatatcatggctggattgcaacaaaccaacagtgaaaagattctcctgagctgggtccgacaatcaactcgtaattatccacaggttaatgtaatcaacttcaccaccagctggtctgatggcctggctttgaatgctctcatccatagtcataggccagacctatttgactggaatagtgtggtttgccagcagtcagccacacaacgactggaacatgcattcaacatcgccagatatcaattaggcatagagaaactactcgatcctgaagatgttgataccacctatccagataagaagtccatcttaatgtacatcacatcactcttccaagttttgcctcaacaagtgagcattgaagccatccaggaagtggaaatgttgccaaggccacctaaagtgactaaagaagaacattttcagttacatcatcaaatgcactattctcaacagatcacggtcagtctagcacagggatatgagagaacttcttcccctaagcctcgattcaagagctatgcctacacacaggctgcttatgtcaccacctctgaccctacacggagcccatttccttcacagcatttggaagctcctgaagacaagtcatttggcagttcattgatggagagtgaagtaaacctggaccgttatcaaacagctttagaagaagtattatcgtggcttctttctgctgaggacacattgcaagcacaaggagagatttctaatgatgtggaagtggtgaaagaccagtttcatactcatgaggggtacatgatggatttgacagcccatcagggccgggttggtaatattctacaattgggaagtaagctgattggaacaggaaaattatcagaagatgaagaaactgaagtacaagagcagatgaatctcctaaattcaagatgggaatgcctcagggtagctagcatggaaaaacaaagcaatttacatagagttttaatggatcgatttgacagatctgttgagaaatggcggcgttttcattatgatataaagatatttaatcagtggctaacagaagctgaacagtttctcagaaagacacaaattcctgagaattgggaacatgctaaatacaaatggtatcttaaggaactccaggatggcattgggcagcggcaaactgttgtcagaacattgaatgcaactggggaagaaataattcagcaatcctcaaaaacagatgccagtattctacaggaaaaattgggaagcctgaatctgcggtggcaggaggtctgcaaacagctgtcagacagaaaaaagaggctagaagaacaaaagcagcctgacctagctcctggactgaccactattggagcctctcctactcagactgttactctggtgacacaacctgtggttactaaggaaactgccatctccaaactagaaatgccatcttccttgatgttggaggtacctaaggattcaacacaatggctggaagctaaggaagaagctgagcaggtcttaggacaggccagagccaagcttgagtcatggaaggagggtccctatacagtagatgcaatccaaaagaaaatcacagaaaccaagcagttggccaaagacctccgccagtggcagacaaatgtagatgtggcaaatgacttggccctgaaacttctccgggattattctgcagatgataccagaaaagtccacatgataacagagaatatcaatgcctcttggagaagcattcataaaagggtgagtgagcgagaggctgctttggaagaaactcatagattactgcaacagttccccctggacctggaaaagtttcttgcctggcttacagaagctgaaacaactgccaatgtcctacaggatgctacccgtaaggaaaggctcctagaagactccaagggagtaaaagagctgatgaaacaatggcaagacctccaaggtgaaattgaagctcacacagatgtttatcacaacctggatgaaaacagccaaaaaatcctgagatccctggaaggttccgatgatgcagtcctgttacaaagacgtttggataacatgaacttcaagtggagtgaacttcggaaaaagtctctcaacattaggtcccatttggaagccagttctgaccagtggaagcgtctgggtccagcatctcagcactttctttccacgtctgtccagggtccctgggagagagccatctcgccaaacaaagtgccctactatatcaaccacgagactcaaacaacttgctgggaccatcccaaaatgacagagctctaccagtctttagctgacctgaataatgtcagattctcagcttataggactgccatgaaactccgaagactgcagaaggccctttgcttggatctcttgagcctgtcagctgcatgtgatgccttggaccagcacaacctcaagcaaaatgaccagcccatggatatcctgcagattattaattgtttgaccactatttatgaccgcctggagcaagagcacaacaatttggtcaacgtccctctctgcgtggatatgtgtctgaactggctgctgaatgtttatgatacgggacgaacagggaggatccgtgtcctgtcttttaaaactggcatcatttccctgtgtaaagcacatttggaagacaagtacagataccttttcaagcaagtggcaagttcaacaggattttgtgaccagcgcaggctgggcctccttctgcatgattctatccaaattccaagacagttgggtgaagttgcatcctttgggggcagtaacattgagccaagtgtccggagctgcttccaatttgctaataataagccagagatcgaagcggccctcttcctagactggatgagactggaaccccagtccatggtgtggctgcccgtcctgcacagagtggctgctgcagaaactgccaagcatcaggccaaatgtaacatctgcaaagagtgtccaatcattggattcaggtacaggagtctaaagcactttaattatgacatctgccaaagctgctttttttctggtcgagttgcaaaaggccataaaatgcactatcccatggtggaatattgcactccgactacatcaggagaagatgttcgagactttgccaaggtactaaaaaacaaatttcgaaccaaaaggtattttgcgaagcatccccgaatgggctacctgccagtgcagactgtcttagagggggacaacatggaaactcccgttactctgatcaacttctggccagtagattctgcgcctgcctcgtcccctcagctttcacacgatgatactcattcacgcattgaacattatgctagcaggctagcagaaatggaaaacagcaatggatcttatctaaatgatagcatctctcctaatgagagcatagatgatgaacatttgttaatccagcattactgccaaagtttgaaccaggactcccccctgagccagcctcgtagt

SEQ ID NO: 169 - DNA, 3861 bp, synthetic construct
  source 1..3861: mol_type = other DNA
atgctgtggtgggaggaggtggaggactgctacgagcgggaggacgtgcagaagaagaccttcaccaagtgggtgaacgcccagttcagcaagttcggcaagcagcacatcgagaacctgttcagcgacctgcaggacggccggcggctgctggacctgctggagggcctgaccggccagaagctgcccaaggagaagggcagcacccgggtgcacgccctgaacaacgtgaacaaggccctgcgggtgctgcagaacaacaacgtggacctggtgaacatcggcagcaccgacatcgtggacggcaaccacaagctgaccctgggcctgatctggaacatcatcctgcactggcaggtgaagaacgtgatgaagaacatcatggccggcctgcagcagaccaacagcgagaagatcctgctgagctgggtgcggcagagcacccggaactacccccaggtgaacgtgatcaacttcaccaccagctggagcgacggcctggccctgaacgccctgatccacagccaccggcccgacctgttcgactggaacagcgtggtgtgccagcagagcgccacccagcggctggagcacgccttcaacatcgcccggtaccagctgggcatcgagaagctgctggaccccgaggacgtggacaccacctaccccgacaagaagagcatcctgatgtacatcaccagcctgttccaggtgctgccccagcaggtgagcatcgaggccatccaggaggtggagatgctgccccggccccccaaggtgaccaaggaggagcacttccagctgcaccaccagatgcactacagccagcagatcaccgtgagcctggcccagggctacgagcggaccagcagccccaagccccggttcaagagctacgcctacacccaggccgcctacgtgaccaccagcgaccccacccggagccccttccccagccagcacctggaggcccccgaggacaagagcttcggcagcagcctgatggagagcgaggtgaacctggaccggtaccagaccgccctggaggaggtgctgagctggctgctgagcgccgaggacaccctgcaggcccagggcgagatcagcaacgacgtggaggtggtgaaggaccagttccacacccacgagggctacatgatggacctgaccgcccaccagggccgggtgggcaacatcctgcagctgggcagcaagctgatcggcaccggcaagctgagcgaggacgaggagaccgaggtgcaggagcagatgaacctgctgaacagccggtgggagtgcctgcgggtggccagcatggagaagcagagcaacctgcaccgggtgctgatggaccggttcgaccggagcgtggagaagtggcggcggttccactacgacatcaagatcttcaaccagtggctgaccgaggccgagcagttcctgcggaagacccagatccccgagaactgggagcacgccaagtacaagtggtacctgaaggagctgcaggacggcatcggccagcggcagaccgtggtgcggaccctgaacgccaccggcgaggagatcatccagcagagcagcaagaccgacgccagcatcctgcaggagaagctgggcagcctgaacctgcggtggcaggaggtgtgcaagcagctgagcgaccggaagaagcggctggaggagcagaagcagcccgacctggcccccggcctgaccaccatcggcgccagccccacccagaccgtgaccctggtgacccagcccgtggtgaccaaggagaccgccatcagcaagctggagatgcccagcagcctgatgctggaggtgcccaaggacagcacccagtggctggaggccaaggaggaggccgagcaggtgctgggccaggcccgggccaagctggagagctggaaggagggcccctacaccgtggacgccatccagaagaagatcaccgagaccaagcagctggccaaggacctgcggcagtggcagaccaacgtggacgtggccaacgacctggccctgaagctgctgcgggactacagcgccgacgacacccggaaggtgcacatgatcaccgagaacatcaacgccagctggcggagcatccacaagcgggtgagcgagcgggaggccgccctggaggagacccaccggctgctgcagcagttccccctggacctggagaagttcctggcctggctgaccgaggccgagaccaccgccaacgtgctgcaggacgccacccggaaggagcggctgctggaggacagcaagggcgtgaaggagctgatgaagcagtggcaggacctgcagggcgagatcgaggcccacaccgacgtgtaccacaacctggacgagaacagccagaagatcctgcggagcctggagggcagcgacgacgccgtgctgctgcagcggcggctggacaacatgaacttcaagtggagcgagctgcggaagaagagcctgaacatccggagccacctggaggccagcagcgaccagtggaagcggctgggccccgccagccagcacttcctgagcaccagcgtgcagggcccctgggagcgggccatcagccccaacaaggtgccctactacatcaaccacgagacccagaccacctgctgggaccaccccaagatgaccgagctgtaccagagcctggccgacctgaacaacgtgcggttcagcgcctaccggaccgccatgaagctgcggcggctgcagaaggccctgtgcctggacctgctgagcctgagcgccgcctgcgacgccctggaccagcacaacctgaagcagaacgaccagcccatggacatcctgcagatcatcaactgcctgaccaccatctacgaccggctggagcaggagcacaacaacctggtgaacgtgcccctgtgcgtggacatgtgcctgaactggctgctgaacgtgtacgacaccggccggaccggccggatccgggtgctgagcttcaagaccggcatcatcagcctgtgcaaggcccacctggaggacaagtaccggtacctgttcaagcaggtggccagcagcaccggcttctgcgaccagcggcggctgggcctgctgctgcacgacagcatccagatcccccggcagctgggcgaggtggccagcttcggcggcagcaacatcgagcccagcgtgcggagctgcttccagttcgccaacaacaagcccgagatcgaggccgccctgttcctggactggatgcggctggagccccagagcatggtgtggctgcccgtgctgcaccgggtggccgccgccgagaccgccaagcaccaggccaagtgcaacatctgcaaggagtgccccatcatcggcttccggtaccggagcctgaagcacttcaactacgacatctgccagagctgcttcttcagcggccgggtggccaagggccacaagatgcactaccccatggtggagtactgcacccccaccaccagcggcgaggacgtgcgggacttcgccaaggtgctgaagaacaagttccggaccaagcggtacttcgccaagcacccccggatgggctacctgcccgtgcagaccgtgctggagggcgacaacatggagacccccgtgaccctgatcaacttctggcccgtggacagcgcccccgccagcagcccccagctgagccacgacgacacccacagccggatcgagcactacgccagccggctggccgagatggagaacagcaacggcagctacctgaacgacagcatcagccccaacgagagcatcgacgacgagcacctgctgatccagcactactgccagagcctgaaccaggacagccccctgagccagccccggagc

SEQ ID NO: 170 - DNA, 4050 bp, Homo sapiens
  source 1..4050: mol_type = genomic DNA
atgctttggtgggaagaagtagaggactgttatgaaagagaagatgttcaaaagaaaacattcacaaaatgggtaaatgcacaattttctaagtttgggaagcagcatattgagaacctcttcagtgacctacaggatgggaggcgcctcctagacctcctcgaaggcctgacagggcaaaaactgccaaaagaaaaaggatccacaagagttcatgccctgaacaatgtcaacaaggcactgcgggttttgcagaacaataatgttgatttagtgaatattggaagtactgacatcgtagatggaaatcataaactgactcttggtttgatttggaatataatcctccactggcaggtcaaaaatgtaatgaaaaatatcatggctggattgcaacaaaccaacagtgaaaagattctcctgagctgggtccgacaatcaactcgtaattatccacaggttaatgtaatcaacttcaccaccagctggtctgatggcctggctttgaatgctctcatccatagtcataggccagacctatttgactggaatagtgtggtttgccagcagtcagccacacaacgactggaacatgcattcaacatcgccagatatcaattaggcatagagaaactactcgatcctgaagatgttgataccacctatccagataagaagtccatcttaatgtacatcacatcactcttccaagttttgcctcaacaagtgagcattgaagccatccaggaagtggaaatgttgccaaggccacctaaagtgactaaagaagaacattttcagttacatcatcaaatgcactattctcaacagatcacggtcagtctagcacagggatatgagagaacttcttcccctaagcctcgattcaagagctatgcctacacacaggctgcttatgtcaccacctctgaccctacacggagcccatttccttcacagcatttggaagctcctgaagacaagtcatttggcagttcattgatggagagtgaagtaaacctggaccgttatcaaacagctttagaagaagtattatcgtggcttctttctgctgaggacacattgcaagcacaaggagagatttctaatgatgtggaagtggtgaaagaccagtttcatactcatgaggggtacatgatggatttgacagcccatcagggccgggttggtaatattctacaattgggaagtaagctgattggaacaggaaaattatcagaagatgaagaaactgaagtacaagagcagatgaatctcctaaattcaagatgggaatgcctcagggtagctagcatggaaaaacaaagcaatttacatagagttttaatggatctccagaatcagaaactgaaagagttgaatgactggctaacaaaaacagaagaaagaacaaggaaaatggaggaagagcctcttggacctgatcttgaagacctaaaacgccaagtacaacaacataaggtgcttcaagaagatctagaacaagaacaagtcagggtcaattctctcactcacatggtggtggtagttgatgaatctagtggagatcacgcaactgctgctttggaagaacaacttaaggtattgggagatcgatgggcaaacatctgtagatggacagaagaccgctgggttcttttacaagaccgatttgacagatctgttgagaaatggcggcgttttcattatgatataaagatatttaatcagtggctaacagaagctgaacagtttctcagaaagacacaaattcctgagaattgggaacatgctaaatacaaatggtatcttaaggaactccaggatggcattgggcagcggcaaactgttgtcagaacattgaatgcaactggggaagaaataattcagcaatcctcaaaaacagatgccagtattctacaggaaaaattgggaagcctgaatctgcggtggcaggaggtctgcaaacagctgtcagacagaaaaaagaggctagaagaacaaaagcagcctgacctagctcctggactgaccactattggagcctctcctactcagactgttactctggtgacacaacctgtggttactaaggaaactgccatctccaaactagaaatgccatcttccttgatgttggaggtacctgaagaaactcatagattactgcaacagttccccctggacctggaaaagtttcttgcctggcttacagaagctgaaacaactgccaatgtcctacaggatgctacccgtaaggaaaggctcctagaagactccaagggagtaaaagagctgatgaaacaatggcaagacctccaaggtgaaattgaagctcacacagatgtttatcacaacctggatgaaaacagccaaaaaatcctgagatccctggaaggttccgatgatgcagtcctgttacaaagacgtttggataacatgaacttcaagtggagtgaacttcggaaaaagtctctcaacattaggtcccatttggaagccagttctgaccagtggaagcgtctgggtccagcatctcagcactttctttccacgtctgtccagggtccctgggagagagccatctcgccaaacaaagtgccctactatatcaaccacgagactcaaacaacttgctgggaccatcccaaaatgacagagctctaccagtctttagctgacctgaataatgtcagattctcagcttataggactgccatgaaactccgaagactgcagaaggccctttgcttggatctcttgagcctgtcagctgcatgtgatgccttggaccagcacaacctcaagcaaaatgaccagcccatggatatcctgcagattattaattgtttgaccactatttatgaccgcctggagcaagagcacaacaatttggtcaacgtccctctctgcgtggatatgtgtctgaactggctgctgaatgtttatgatacgggacgaacagggaggatccgtgtcctgtcttttaaaactggcatcatttccctgtgtaaagcacatttggaagacaagtacagataccttttcaagcaagtggcaagttcaacaggattttgtgaccagcgcaggctgggcctccttctgcatgattctatccaaattccaagacagttgggtgaagttgcatcctttgggggcagtaacattgagccaagtgtccggagctgcttccaatttgctaataataagccagagatcgaagcggccctcttcctagactggatgagactggaaccccagtccatggtgtggctgcccgtcctgcacagagtggctgctgcagaaactgccaagcatcaggccaaatgtaacatctgcaaagagtgtccaatcattggattcaggtacaggagtctaaagcactttaattatgacatctgccaaagctgctttttttctggtcgagttgcaaaaggccataaaatgcactatcccatggtggaatattgcactccgactacatcaggagaagatgttcgagactttgccaaggtactaaaaaacaaatttcgaaccaaaaggtattttgcgaagcatccccgaatgggctacctgccagtgcagactgtcttagagggggacaacatggaaactcccgttactctgatcaacttctggccagtagattctgcgcctgcctcgtcccctcagctttcacacgatgatactcattcacgcattgaacattatgctagcaggctagcagaaatggaaaacagcaatggatcttatctaaatgatagcatctctcctaatgagagcatagatgatgaacatttgttaatccagcattactgccaaagtttgaaccaggactcccccctgagccagcctcgtagtcctgcccagatcttgatttccttagagagtgaggaaagaggggagctagagagaatcctagcagatcttgaggaagaaaacaggaatctgcaagcagaatatgaccgtctaaagcagcagcacgaacataaaggcctgtccccactgccgtcccctcctgaaatgatgcccacctctccccagagtccc

SEQ ID NO: 171 - DNA, 4050 bp, synthetic construct
  source 1..4050: mol_type = other DNA
atgctgtggtgggaggaggtggaggactgctacgagcgggaggacgtgcagaagaagaccttcaccaagtgggtgaacgcccagttcagcaagttcggcaagcagcacatcgagaacctgttcagcgacctgcaggacggccggcggctgctggacctgctggagggcctgaccggccagaagctgcccaaggagaagggcagcacccgggtgcacgccctgaacaacgtgaacaaggccctgcgggtgctgcagaacaacaacgtggacctggtgaacatcggcagcaccgacatcgtggacggcaaccacaagctgaccctgggcctgatctggaacatcatcctgcactggcaggtgaagaacgtgatgaagaacatcatggccggcctgcagcagaccaacagcgagaagatcctgctgagctgggtgcggcagagcacccggaactacccccaggtgaacgtgatcaacttcaccaccagctggagcgacggcctggccctgaacgccctgatccacagccaccggcccgacctgttcgactggaacagcgtggtgtgccagcagagcgccacccagcggctggagcacgccttcaacatcgcccggtaccagctgggcatcgagaagctgctggaccccgaggacgtggacaccacctaccccgacaagaagagcatcctgatgtacatcaccagcctgttccaggtgctgccccagcaggtgagcatcgaggccatccaggaggtggagatgctgccccggccccccaaggtgaccaaggaggagcacttccagctgcaccaccagatgcactacagccagcagatcaccgtgagcctggcccagggctacgagcggaccagcagccccaagccccggttcaagagctacgcctacacccaggccgcctacgtgaccaccagcgaccccacccggagccccttccccagccagcacctggaggcccccgaggacaagagcttcggcagcagcctgatggagagcgaggtgaacctggaccggtaccagaccgccctggaggaggtgctgagctggctgctgagcgccgaggacaccctgcaggcccagggcgagatcagcaacgacgtggaggtggtgaaggaccagttccacacccacgagggctacatgatggacctgaccgcccaccagggccgggtgggcaacatcctgcagctgggcagcaagctgatcggcaccggcaagctgagcgaggacgaggagaccgaggtgcaggagcagatgaacctgctgaacagccggtgggagtgcctgcgggtggccagcatggagaagcagagcaacctgcaccgggtgctgatggacctgcagaaccagaagctgaaggagctgaacgactggctgaccaagaccgaggagcggacccggaagatggaggaggagcccctgggccccgacctggaggacctgaagcggcaggtgcagcagcacaaggtgctgcaggaggacctggagcaggagcaggtgcgggtgaacagcctgacccacatggtggtggtggtggacgagagcagcggcgaccacgccaccgccgccctggaggagcagctgaaggtgctgggcgaccggtgggccaacatctgccggtggaccgaggaccggtgggtgctgctgcaggaccggttcgaccggagcgtggagaagtggcggcggttccactacgacatcaagatcttcaaccagtggctgaccgaggccgagcagttcctgcggaagacccagatccccgagaactgggagcacgccaagtacaagtggtacctgaaggagctgcaggacggcatcggccagcggcagaccgtggtgcggaccctgaacgccaccggcgaggagatcatccagcagagcagcaagaccgacgccagcatcctgcaggagaagctgggcagcctgaacctgcggtggcaggaggtgtgcaagcagctgagcgaccggaagaagcggctggaggagcagaagcagcccgacctggcccccggcctgaccaccatcggcgccagccccacccagaccgtgaccctggtgacccagcccgtggtgaccaaggagaccgccatcagcaagctggagatgcccagcagcctgatgctggaggtgcccgaggagacccaccggctgctgcagcagttccccctggacctggagaagttcctggcctggctgaccgaggccgagaccaccgccaacgtgctgcaggacgccacccggaaggagcggctgctggaggacagcaagggcgtgaaggagctgatgaagcagtggcaggacctgcagggcgagatcgaggcccacaccgacgtgtaccacaacctggacgagaacagccagaagatcctgcggagcctggagggcagcgacgacgccgtgctgctgcagcggcggctggacaacatgaacttcaagtggagcgagctgcggaagaagagcctgaacatccggagccacctggaggccagcagcgaccagtggaagcggctgggccccgccagccagcacttcctgagcaccagcgtgcagggcccctgggagcgggccatcagccccaacaaggtgccctactacatcaaccacgagacccagaccacctgctgggaccaccccaagatgaccgagctgtaccagagcctggccgacctgaacaacgtgcggttcagcgcctaccggaccgccatgaagctgcggcggctgcagaaggccctgtgcctggacctgctgagcctgagcgccgcctgcgacgccctggaccagcacaacctgaagcagaacgaccagcccatggacatcctgcagatcatcaactgcctgaccaccatctacgaccggctggagcaggagcacaacaacctggtgaacgtgcccctgtgcgtggacatgtgcctgaactggctgctgaacgtgtacgacaccggccggaccggccggatccgggtgctgagcttcaagaccggcatcatcagcctgtgcaaggcccacctggaggacaagtaccggtacctgttcaagcaggtggccagcagcaccggcttctgcgaccagcggcggctgggcctgctgctgcacgacagcatccagatcccccggcagctgggcgaggtggccagcttcggcggcagcaacatcgagcccagcgtgcggagctgcttccagttcgccaacaacaagcccgagatcgaggccgccctgttcctggactggatgcggctggagccccagagcatggtgtggctgcccgtgctgcaccgggtggccgccgccgagaccgccaagcaccaggccaagtgcaacatctgcaaggagtgccccatcatcggcttccggtaccggagcctgaagcacttcaactacgacatctgccagagctgcttcttcagcggccgggtggccaagggccacaagatgcactaccccatggtggagtactgcacccccaccaccagcggcgaggacgtgcgggacttcgccaaggtgctgaagaacaagttccggaccaagcggtacttcgccaagcacccccggatgggctacctgcccgtgcagaccgtgctggagggcgacaacatggagacccccgtgaccctgatcaacttctggcccgtggacagcgcccccgccagcagcccccagctgagccacgacgacacccacagccggatcgagcactacgccagccggctggccgagatggagaacagcaacggcagctacctgaacgacagcatcagccccaacgagagcatcgacgacgagcacctgctgatccagcactactgccagagcctgaaccaggacagccccctgagccagccccggagccccgcccagatcctgatcagcctggagagcgaggagcggggcgagctggagcggatcctggccgacctggaggaggagaaccggaacctgcaggccgagtacgaccggctgaagcagcagcacgagcacaagggcctgagccccctgcccagcccccccgagatgatgcccaccagcccccagagcccc

SEQ ID NO: 172 - DNA, 4050 bp, Homo sapiens
  source 1..4050: mol_type = genomic DNA
atgctttggtgggaagaagtagaggactgttatgaaagagaagatgttcaaaagaaaacattcacaaaatgggtaaatgcacaattttctaagtttgggaagcagcatattgagaacctcttcagtgacctacaggatgggaggcgcctcctagacctcctcgaaggcctgacagggcaaaaactgccaaaagaaaaaggatccacaagagttcatgccctgaacaatgtcaacaaggcactgcgggttttgcagaacaataatgttgatttagtgaatattggaagtactgacatcgtagatggaaatcataaactgactcttggtttgatttggaatataatcctccactggcaggtcaaaaatgtaatgaaaaatatcatggctggattgcaacaaaccaacagtgaaaagattctcctgagctgggtccgacaatcaactcgtaattatccacaggttaatgtaatcaacttcaccaccagctggtctgatggcctggctttgaatgctctcatccatagtcataggccagacctatttgactggaatagtgtggtttgccagcagtcagccacacaacgactggaacatgcattcaacatcgccagatatcaattaggcatagagaaactactcgatcctgaagatgttgataccacctatccagataagaagtccatcttaatgtacatcacatcactcttccaagttttgcctcaacaagtgagcattgaagccatccaggaagtggaaatgttgccaaggccacctaaagtgactaaagaagaacattttcagttacatcatcaaatgcactattctcaacagatcacggtcagtctagcacagggatatgagagaacttcttcccctaagcctcgattcaagagctatgcctacacacaggctgcttatgtcaccacctctgaccctacacggagcccatttccttcacagcatttggaagctcctgaagacaagtcatttggcagttcattgatggagagtgaagtaaacctggaccgttatcaaacagctttagaagaagtattatcgtggcttctttctgctgaggacacattgcaagcacaaggagagatttctaatgatgtggaagtggtgaaagaccagtttcatactcatgaggggtacatgatggatttgacagcccatcagggccgggttggtaatattctacaattgggaagtaagctgattggaacaggaaaattatcagaagatgaagaaactgaagtacaagagcagatgaatctcctaaattcaagatgggaatgcctcagggtagctagcatggaaaaacaaagcaatttacatagagttttaatggatcgatttgacagatctgttgagaaatggcggcgttttcattatgatataaagatatttaatcagtggctaacagaagctgaacagtttctcagaaagacacaaattcctgagaattgggaacatgctaaatacaaatggtatcttaaggaactccaggatggcattgggcagcggcaaactgttgtcagaacattgaatgcaactggggaagaaataattcagcaatcctcaaaaacagatgccagtattctacaggaaaaattgggaagcctgaatctgcggtggcaggaggtctgcaaacagctgtcagacagaaaaaagaggctagaagaacaaaagcagcctgacctagctcctggactgaccactattggagcctctcctactcagactgttactctggtgacacaacctgtggttactaaggaaactgccatctccaaactagaaatgccatcttccttgatgttggaggtacctaaggattcaacacaatggctggaagctaaggaagaagctgagcaggtcttaggacaggccagagccaagcttgagtcatggaaggagggtccctatacagtagatgcaatccaaaagaaaatcacagaaaccaagcagttggccaaagacctccgccagtggcagacaaatgtagatgtggcaaatgacttggccctgaaacttctccgggattattctgcagatgataccagaaaagtccacatgataacagagaatatcaatgcctcttggagaagcattcataaaagggtgagtgagcgagaggctgctttggaagaaactcatagattactgcaacagttccccctggacctggaaaagtttcttgcctggcttacagaagctgaaacaactgccaatgtcctacaggatgctacccgtaaggaaaggctcctagaagactccaagggagtaaaagagctgatgaaacaatggcaagacctccaaggtgaaattgaagctcacacagatgtttatcacaacctggatgaaaacagccaaaaaatcctgagatccctggaaggttccgatgatgcagtcctgttacaaagacgtttggataacatgaacttcaagtggagtgaacttcggaaaaagtctctcaacattaggtcccatttggaagccagttctgaccagtggaagcgtctgggtccagcatctcagcactttctttccacgtctgtccagggtccctgggagagagccatctcgccaaacaaagtgccctactatatcaaccacgagactcaaacaacttgctgggaccatcccaaaatgacagagctctaccagtctttagctgacctgaataatgtcagattctcagcttataggactgccatgaaactccgaagactgcagaaggccctttgcttggatctcttgagcctgtcagctgcatgtgatgccttggaccagcacaacctcaagcaaaatgaccagcccatggatatcctgcagattattaattgtttgaccactatttatgaccgcctggagcaagagcacaacaatttggtcaacgtccctctctgcgtggatatgtgtctgaactggctgctgaatgtttatgatacgggacgaacagggaggatccgtgtcctgtcttttaaaactggcatcatttccctgtgtaaagcacatttggaagacaagtacagataccttttcaagcaagtggcaagttcaacaggattttgtgaccagcgcaggctgggcctccttctgcatgattctatccaaattccaagacagttgggtgaagttgcatcctttgggggcagtaacattgagccaagtgtccggagctgcttccaatttgctaataataagccagagatcgaagcggccctcttcctagactggatgagactggaaccccagtccatggtgtggctgcccgtcctgcacagagtggctgctgcagaaactgccaagcatcaggccaaatgtaacatctgcaaagagtgtccaatcattggattcaggtacaggagtctaaagcactttaattatgacatctgccaaagctgctttttttctggtcgagttgcaaaaggccataaaatgcactatcccatggtggaatattgcactccgactacatcaggagaagatgttcgagactttgccaaggtactaaaaaacaaatttcgaaccaaaaggtattttgcgaagcatccccgaatgggctacctgccagtgcagactgtcttagagggggacaacatggaaactcccgttactctgatcaacttctggccagtagattctgcgcctgcctcgtcccctcagctttcacacgatgatactcattcacgcattgaacattatgctagcaggctagcagaaatggaaaacagcaatggatcttatctaaatgatagcatctctcctaatgagagcatagatgatgaacatttgttaatccagcattactgccaaagtttgaaccaggactcccccctgagccagcctcgtagtcctgcccagatcttgatttccttagagagtgaggaaagaggggagctagagagaatcctagcagatcttgaggaagaaaacaggaatctgcaagcagaatatgaccgtctaaagcagcagcacgaacataaaggcctgtccccactgccgtcccctcctgaaatgatgcccacctctccccagagtccc

SEQ ID NO: 173 - DNA, 4050 bp, synthetic construct
  source 1..4050: mol_type = other DNA
atgctgtggtgggaggaggtggaggactgctacgagcgggaggacgtgcagaagaagaccttcaccaagtgggtgaacgcccagttcagcaagttcggcaagcagcacatcgagaacctgttcagcgacctgcaggacggccggcggctgctggacctgctggagggcctgaccggccagaagctgcccaaggagaagggcagcacccgggtgcacgccctgaacaacgtgaacaaggccctgcgggtgctgcagaacaacaacgtggacctggtgaacatcggcagcaccgacatcgtggacggcaaccacaagctgaccctgggcctgatctggaacatcatcctgcactggcaggtgaagaacgtgatgaagaacatcatggccggcctgcagcagaccaacagcgagaagatcctgctgagctgggtgcggcagagcacccggaactacccccaggtgaacgtgatcaacttcaccaccagctggagcgacggcctggccctgaacgccctgatccacagccaccggcccgacctgttcgactggaacagcgtggtgtgccagcagagcgccacccagcggctggagcacgccttcaacatcgcccggtaccagctgggcatcgagaagctgctggaccccgaggacgtggacaccacctaccccgacaagaagagcatcctgatgtacatcaccagcctgttccaggtgctgccccagcaggtgagcatcgaggccatccaggaggtggagatgctgccccggccccccaaggtgaccaaggaggagcacttccagctgcaccaccagatgcactacagccagcagatcaccgtgagcctggcccagggctacgagcggaccagcagccccaagccccggttcaagagctacgcctacacccaggccgcctacgtgaccaccagcgaccccacccggagccccttccccagccagcacctggaggcccccgaggacaagagcttcggcagcagcctgatggagagcgaggtgaacctggaccggtaccagaccgccctggaggaggtgctgagctggctgctgagcgccgaggacaccctgcaggcccagggcgagatcagcaacgacgtggaggtggtgaaggaccagttccacacccacgagggctacatgatggacctgaccgcccaccagggccgggtgggcaacatcctgcagctgggcagcaagctgatcggcaccggcaagctgagcgaggacgaggagaccgaggtgcaggagcagatgaacctgctgaacagccggtgggagtgcctgcgggtggccagcatggagaagcagagcaacctgcaccgggtgctgatggaccggttcgaccggagcgtggagaagtggcggcggttccactacgacatcaagatcttcaaccagtggctgaccgaggccgagcagttcctgcggaagacccagatccccgagaactgggagcacgccaagtacaagtggtacctgaaggagctgcaggacggcatcggccagcggcagaccgtggtgcggaccctgaacgccaccggcgaggagatcatccagcagagcagcaagaccgacgccagcatcctgcaggagaagctgggcagcctgaacctgcggtggcaggaggtgtgcaagcagctgagcgaccggaagaagcggctggaggagcagaagcagcccgacctggcccccggcctgaccaccatcggcgccagccccacccagaccgtgaccctggtgacccagcccgtggtgaccaaggagaccgccatcagcaagctggagatgcccagcagcctgatgctggaggtgcccaaggacagcacccagtggctggaggccaaggaggaggccgagcaggtgctgggccaggcccgggccaagctggagagctggaaggagggcccctacaccgtggacgccatccagaagaagatcaccgagaccaagcagctggccaaggacctgcggcagtggcagaccaacgtggacgtggccaacgacctggccctgaagctgctgcgggactacagcgccgacgacacccggaaggtgcacatgatcaccgagaacatcaacgccagctggcggagcatccacaagcgggtgagcgagcgggaggccgccctggaggagacccaccggctgctgcagcagttccccctggacctggagaagttcctggcctggctgaccgaggccgagaccaccgccaacgtgctgcaggacgccacccggaaggagcggctgctggaggacagcaagggcgtgaaggagctgatgaagcagtggcaggacctgcagggcgagatcgaggcccacaccgacgtgtaccacaacctggacgagaacagccagaagatcctgcggagcctggagggcagcgacgacgccgtgctgctgcagcggcggctggacaacatgaacttcaagtggagcgagctgcggaagaagagcctgaacatccggagccacctggaggccagcagcgaccagtggaagcggctgggccccgccagccagcacttcctgagcaccagcgtgcagggcccctgggagcgggccatcagccccaacaaggtgccctactacatcaaccacgagacccagaccacctgctgggaccaccccaagatgaccgagctgtaccagagcctggccgacctgaacaacgtgcggttcagcgcctaccggaccgccatgaagctgcggcggctgcagaaggccctgtgcctggacctgctgagcctgagcgccgcctgcgacgccctggaccagcacaacctgaagcagaacgaccagcccatggacatcctgcagatcatcaactgcctgaccaccatctacgaccggctggagcaggagcacaacaacctggtgaacgtgcccctgtgcgtggacatgtgcctgaactggctgctgaacgtgtacgacaccggccggaccggccggatccgggtgctgagcttcaagaccggcatcatcagcctgtgcaaggcccacctggaggacaagtaccggtacctgttcaagcaggtggccagcagcaccggcttctgcgaccagcggcggctgggcctgctgctgcacgacagcatccagatcccccggcagctgggcgaggtggccagcttcggcggcagcaacatcgagcccagcgtgcggagctgcttccagttcgccaacaacaagcccgagatcgaggccgccctgttcctggactggatgcggctggagccccagagcatggtgtggctgcccgtgctgcaccgggtggccgccgccgagaccgccaagcaccaggccaagtgcaacatctgcaaggagtgccccatcatcggcttccggtaccggagcctgaagcacttcaactacgacatctgccagagctgcttcttcagcggccgggtggccaagggccacaagatgcactaccccatggtggagtactgcacccccaccaccagcggcgaggacgtgcgggacttcgccaaggtgctgaagaacaagttccggaccaagcggtacttcgccaagcacccccggatgggctacctgcccgtgcagaccgtgctggagggcgacaacatggagacccccgtgaccctgatcaacttctggcccgtggacagcgcccccgccagcagcccccagctgagccacgacgacacccacagccggatcgagcactacgccagccggctggccgagatggagaacagcaacggcagctacctgaacgacagcatcagccccaacgagagcatcgacgacgagcacctgctgatccagcactactgccagagcctgaaccaggacagccccctgagccagccccggagccccgcccagatcctgatcagcctggagagcgaggagcggggcgagctggagcggatcctggccgacctggaggaggagaaccggaacctgcaggccgagtacgaccggctgaagcagcagcacgagcacaagggcctgagccccctgcccagcccccccgagatgatgcccaccagcccccagagcccc

SEQ ID NO: 174 - DNA, 4035 bp, Homo sapiens
  source 1..4035: mol_type = genomic DNA
atgctttggtgggaagaagtagaggactgttatgaaagagaagatgttcaaaagaaaacattcacaaaatgggtaaatgcacaattttctaagtttgggaagcagcatattgagaacctcttcagtgacctacaggatgggaggcgcctcctagacctcctcgaaggcctgacagggcaaaaactgccaaaagaaaaaggatccacaagagttcatgccctgaacaatgtcaacaaggcactgcgggttttgcagaacaataatgttgatttagtgaatattggaagtactgacatcgtagatggaaatcataaactgactcttggtttgatttggaatataatcctccactggcaggtcaaaaatgtaatgaaaaatatcatggctggattgcaacaaaccaacagtgaaaagattctcctgagctgggtccgacaatcaactcgtaattatccacaggttaatgtaatcaacttcaccaccagctggtctgatggcctggctttgaatgctctcatccatagtcataggccagacctatttgactggaatagtgtggtttgccagcagtcagccacacaacgactggaacatgcattcaacatcgccagatatcaattaggcatagagaaactactcgatcctgaagatgttgataccacctatccagataagaagtccatcttaatgtacatcacatcactcttccaagttttgcctcaacaagtgagcattgaagccatccaggaagtggaaatgttgccaaggccacctaaagtgactaaagaagaacattttcagttacatcatcaaatgcactattctcaacagatcacggtcagtctagcacagggatatgagagaacttcttcccctaagcctcgattcaagagctatgcctacacacaggctgcttatgtcaccacctctgaccctacacggagcccatttccttcacagcatttggaagctcctgaagacaagtcatttggcagttcattgatggagagtgaagtaaacctggaccgttatcaaacagctttagaagaagtattatcgtggcttctttctgctgaggacacattgcaagcacaaggagagatttctaatgatgtggaagtggtgaaagaccagtttcatactcatgaggggtacatgatggatttgacagcccatcagggccgggttggtaatattctacaattgggaagtaagctgattggaacaggaaaattatcagaagatgaagaaactgaagtacaagagcagatgaatctcctaaattcaagatgggaatgcctcagggtagctagcatggaaaaacaaagcaatttacatagagttttaatggatctccagaatcagaaactgaaagagttgaatgactggctaacaaaaacagaagaaagaacaaggaaaatggaggaagagcctcttggacctgatcttgaagacctaaaacgccaagtacaacaacataaggtgcttcaagaagatctagaacaagaacaagtcagggtcaattctctcactcacatggtggtggtagttgatgaatctagtggagatcacgcaactgctgctttggaagaacaacttaaggtattgggagatcgatgggcaaacatctgtagatggacagaagaccgctgggttcttttacaagaccgatttgacagatctgttgagaaatggcggcgttttcattatgatataaagatatttaatcagtggctaacagaagctgaacagtttctcagaaagacacaaattcctgagaattgggaacatgctaaatacaaatggtatcttaaggaactccaggatggcattgggcagcggcaaactgttgtcagaacattgaatgcaactggggaagaaataattcagcaatcctcaaaaacagatgccagtattctacaggaaaaattgggaagcctgaatctgcggtggcaggaggtctgcaaacagctgtcagacagaaaaaagaggctagaagaacaaaagaaggattcaacacaatggctggaagctaaggaagaagctgagcaggtcttaggacaggccagagccaagcttgagtcatggaaggagggtccctatacagtagatgcaatccaaaagaaaatcacagaaaccaagcagttggccaaagacctccgccagtggcagacaaatgtagatgtggcaaatgacttggccctgaaacttctccgggattattctgcagatgataccagaaaagtccacatgataacagagaatatcaatgcctcttggagaagcattcataaaagggtgagtgagcgagaggctgctttggaagaaactcatagattactgcaacagttccccctggacctggaaaagtttcttgcctggcttacagaagctgaaacaactgccaatgtcctacaggatgctacccgtaaggaaaggctcctagaagactccaagggagtaaaagagctgatgaaacaatggcaagacctccaaggtgaaattgaagctcacacagatgtttatcacaacctggatgaaaacagccaaaaaatcctgagatccctggaaggttccgatgatgcagtcctgttacaaagacgtttggataacatgaacttcaagtggagtgaacttcggaaaaagtctctcaacattaggtcccatttggaagccagttctgaccagtggaagcgtctgggtccagcatctcagcactttctttccacgtctgtccagggtccctgggagagagccatctcgccaaacaaagtgccctactatatcaaccacgagactcaaacaacttgctgggaccatcccaaaatgacagagctctaccagtctttagctgacctgaataatgtcagattctcagcttataggactgccatgaaactccgaagactgcagaaggccctttgcttggatctcttgagcctgtcagctgcatgtgatgccttggaccagcacaacctcaagcaaaatgaccagcccatggatatcctgcagattattaattgtttgaccactatttatgaccgcctggagcaagagcacaacaatttggtcaacgtccctctctgcgtggatatgtgtctgaactggctgctgaatgtttatgatacgggacgaacagggaggatccgtgtcctgtcttttaaaactggcatcatttccctgtgtaaagcacatttggaagacaagtacagataccttttcaagcaagtggcaagttcaacaggattttgtgaccagcgcaggctgggcctccttctgcatgattctatccaaattccaagacagttgggtgaagttgcatcctttgggggcagtaacattgagccaagtgtccggagctgcttccaatttgctaataataagccagagatcgaagcggccctcttcctagactggatgagactggaaccccagtccatggtgtggctgcccgtcctgcacagagtggctgctgcagaaactgccaagcatcaggccaaatgtaacatctgcaaagagtgtccaatcattggattcaggtacaggagtctaaagcactttaattatgacatctgccaaagctgctttttttctggtcgagttgcaaaaggccataaaatgcactatcccatggtggaatattgcactccgactacatcaggagaagatgttcgagactttgccaaggtactaaaaaacaaatttcgaaccaaaaggtattttgcgaagcatccccgaatgggctacctgccagtgcagactgtcttagagggggacaacatggaaactcccgttactctgatcaacttctggccagtagattctgcgcctgcctcgtcccctcagctttcacacgatgatactcattcacgcattgaacattatgctagcaggctagcagaaatggaaaacagcaatggatcttatctaaatgatagcatctctcctaatgagagcatagatgatgaacatttgttaatccagcattactgccaaagtttgaaccaggactcccccctgagccagcctcgtagt

SEQ ID NO: 175 - DNA, 4035 bp, synthetic construct
  source 1..4035: mol_type = other DNA
atgctgtggtgggaggaggtggaggactgctacgagcgggaggacgtgcagaagaagaccttcaccaagtgggtgaacgcccagttcagcaagttcggcaagcagcacatcgagaacctgttcagcgacctgcaggacggccggcggctgctggacctgctggagggcctgaccggccagaagctgcccaaggagaagggcagcacccgggtgcacgccctgaacaacgtgaacaaggccctgcgggtgctgcagaacaacaacgtggacctggtgaacatcggcagcaccgacatcgtggacggcaaccacaagctgaccctgggcctgatctggaacatcatcctgcactggcaggtgaagaacgtgatgaagaacatcatggccggcctgcagcagaccaacagcgagaagatcctgctgagctgggtgcggcagagcacccggaactacccccaggtgaacgtgatcaacttcaccaccagctggagcgacggcctggccctgaacgccctgatccacagccaccggcccgacctgttcgactggaacagcgtggtgtgccagcagagcgccacccagcggctggagcacgccttcaacatcgcccggtaccagctgggcatcgagaagctgctggaccccgaggacgtggacaccacctaccccgacaagaagagcatcctgatgtacatcaccagcctgttccaggtgctgccccagcaggtgagcatcgaggccatccaggaggtggagatgctgccccggccccccaaggtgaccaaggaggagcacttccagctgcaccaccagatgcactacagccagcagatcaccgtgagcctggcccagggctacgagcggaccagcagccccaagccccggttcaagagctacgcctacacccaggccgcctacgtgaccaccagcgaccccacccggagccccttccccagccagcacctggaggcccccgaggacaagagcttcggcagcagcctgatggagagcgaggtgaacctggaccggtaccagaccgccctggaggaggtgctgagctggctgctgagcgccgaggacaccctgcaggcccagggcgagatcagcaacgacgtggaggtggtgaaggaccagttccacacccacgagggctacatgatggacctgaccgcccaccagggccgggtgggcaacatcctgcagctgggcagcaagctgatcggcaccggcaagctgagcgaggacgaggagaccgaggtgcaggagcagatgaacctgctgaacagccggtgggagtgcctgcgggtggccagcatggagaagcagagcaacctgcaccgggtgctgatggacctgcagaaccagaagctgaaggagctgaacgactggctgaccaagaccgaggagcggacccggaagatggaggaggagcccctgggccccgacctggaggacctgaagcggcaggtgcagcagcacaaggtgctgcaggaggacctggagcaggagcaggtgcgggtgaacagcctgacccacatggtggtggtggtggacgagagcagcggcgaccacgccaccgccgccctggaggagcagctgaaggtgctgggcgaccggtgggccaacatctgccggtggaccgaggaccggtgggtgctgctgcaggaccggttcgaccggagcgtggagaagtggcggcggttccactacgacatcaagatcttcaaccagtggctgaccgaggccgagcagttcctgcggaagacccagatccccgagaactgggagcacgccaagtacaagtggtacctgaaggagctgcaggacggcatcggccagcggcagaccgtggtgcggaccctgaacgccaccggcgaggagatcatccagcagagcagcaagaccgacgccagcatcctgcaggagaagctgggcagcctgaacctgcggtggcaggaggtgtgcaagcagctgagcgaccggaagaagcggctggaggagcagaagaaggacagcacccagtggctggaggccaaggaggaggccgagcaggtgctgggccaggcccgggccaagctggagagctggaaggagggcccctacaccgtggacgccatccagaagaagatcaccgagaccaagcagctggccaaggacctgcggcagtggcagaccaacgtggacgtggccaacgacctggccctgaagctgctgcgggactacagcgccgacgacacccggaaggtgcacatgatcaccgagaacatcaacgccagctggcggagcatccacaagcgggtgagcgagcgggaggccgccctggaggagacccaccggctgctgcagcagttccccctggacctggagaagttcctggcctggctgaccgaggccgagaccaccgccaacgtgctgcaggacgccacccggaaggagcggctgctggaggacagcaagggcgtgaaggagctgatgaagcagtggcaggacctgcagggcgagatcgaggcccacaccgacgtgtaccacaacctggacgagaacagccagaagatcctgcggagcctggagggcagcgacgacgccgtgctgctgcagcggcggctggacaacatgaacttcaagtggagcgagctgcggaagaagagcctgaacatccggagccacctggaggccagcagcgaccagtggaagcggctgggccccgccagccagcacttcctgagcaccagcgtgcagggcccctgggagcgggccatcagccccaacaaggtgccctactacatcaaccacgagacccagaccacctgctgggaccaccccaagatgaccgagctgtaccagagcctggccgacctgaacaacgtgcggttcagcgcctaccggaccgccatgaagctgcggcggctgcagaaggccctgtgcctggacctgctgagcctgagcgccgcctgcgacgccctggaccagcacaacctgaagcagaacgaccagcccatggacatcctgcagatcatcaactgcctgaccaccatctacgaccggctggagcaggagcacaacaacctggtgaacgtgcccctgtgcgtggacatgtgcctgaactggctgctgaacgtgtacgacaccggccggaccggccggatccgggtgctgagcttcaagaccggcatcatcagcctgtgcaaggcccacctggaggacaagtaccggtacctgttcaagcaggtggccagcagcaccggcttctgcgaccagcggcggctgggcctgctgctgcacgacagcatccagatcccccggcagctgggcgaggtggccagcttcggcggcagcaacatcgagcccagcgtgcggagctgcttccagttcgccaacaacaagcccgagatcgaggccgccctgttcctggactggatgcggctggagccccagagcatggtgtggctgcccgtgctgcaccgggtggccgccgccgagaccgccaagcaccaggccaagtgcaacatctgcaaggagtgccccatcatcggcttccggtaccggagcctgaagcacttcaactacgacatctgccagagctgcttcttcagcggccgggtggccaagggccacaagatgcactaccccatggtggagtactgcacccccaccaccagcggcgaggacgtgcgggacttcgccaaggtgctgaagaacaagttccggaccaagcggtacttcgccaagcacccccggatgggctacctgcccgtgcagaccgtgctggagggcgacaacatggagacccccgtgaccctgatcaacttctggcccgtggacagcgcccccgccagcagcccccagctgagccacgacgacacccacagccggatcgagcactacgccagccggctggccgagatggagaacagcaacggcagctacctgaacgacagcatcagccccaacgagagcatcgacgacgagcacctgctgatccagcactactgccagagcctgaaccaggacagccccctgagccagccccggagc

SEQ ID NO: 176 - DNA, 3786 bp, Homo sapiens
  source 1..3786: mol_type = genomic DNA
atggccaagtatggagaacatgaagccagtcctgacaatgggcagaacgaattcagtgatatcattaagtccagatctgatgaacacaatgacgtacagaagaaaacctttaccaaatggataaatgctcgattttcaaagagtgggaaaccacccatcaatgatatgttcacagacctcaaagatggaaggaagctattggatcttctagaaggcctcacaggaacatcactgccaaaggaacgtggttccacaagggtacatgccttaaataacgtcaacagagtgctgcaggttttacatcagaacaatgtggaattagtgaatatagggggaactgacattgtggatggaaatcacaaactgactttggggttactttggagcatcattttgcactggcaggtgaaagatgtcatgaaggatgtcatgtcggacctgcagcagacgaacagtgagaagatcctgctcagctgggtgcgtcagaccaccaggccctacagccaagtcaacgtcctcaacttcaccaccagctggacagatggactcgcctttaatgctgtcctccaccgacataaacctgatctcttcagctgggataaagttgtcaaaatgtcaccaattgagagacttgaacatgccttcagcaaggctcaaacttatttgggaattgaaaagctgttagatcctgaagatgttgccgttcagcttcctgacaagaaatccataattatgtatttaacatctttgtttgaggtgctacctcagcaagtcaccatagacgccatccgtgaggtagagacactcccaaggaaatataaaaaagaatgtgaagaagaggcaattaatatacagagtacagcgcctgaggaggagcatgagagtccccgagctgaaactcccagcactgtcactgaggttgacatggatctggacagctatcagattgcgttggaggaagtgctgacctggttgctttctgctgaggacactttccaggagcaggatgatatttctgatgatgttgaagaagtcaaagaccagtttgcaacccatgaagcttttatgatggaactgactgcacaccagagcagtgtgggcagcgtcctgcaggcaggcaaccaactgataacacaaggaactctgtcagacgaagaagaatttgagattcaggaacagatgaccctgctgaatgctagatgggaggctcttagggtggagagtatggacagacagtcccggctgcacgatgtgctgatggaactgcagaagaagcaactgcagcagctctccgcctggttaacactcacagaggagcgcattcagaagatggaaacttgccccctggatgatgatgtaaaatctctacaaaagctgctagaagaacataaaagtttgcaaagtgatcttgaggctgaacaggtgaaagtaaattcactaactcacatggtggtcattgttgatgaaaacagtggtgagagtgctacagctatcctagaagaccagttacagaaacttggtgagcgctggacagcagtatgccgttggactgaagaacgctggaataggttacaagaaatcgccgctagcgcccgatttgacagatctgttgagaaatggcggcgttttcattatgatataaagatatttaatcagtggctaacagaagctgaacagtttctcagaaagacacaaattcctgagaattgggaacatgctaaatacaaatggtatcttaaggaactccaggatggcattgggcagcggcaaactgttgtcagaacattgaatgcaactggggaagaaataattcagcaatcctcaaaaacagatgccagtattctacaggaaaaattgggaagcctgaatctgcggtggcaggaggtctgcaaacagctgtcagacagaaaaaagaggctagaagaacaaaagcagcctgacctagctcctggactgaccactattggagcctctcctactcagactgttactctggtgacacaacctgtggttactaaggaaactgccatctccaaactagaaatgccatcttccttgatgttggaggtacctgaagaaactcatagattactgcaacagttccccctggacctggaaaagtttcttgcctggcttacagaagctgaaacaactgccaatgtcctacaggatgctacccgtaaggaaaggctcctagaagactccaagggagtaaaagagctgatgaaacaatggcaagacctccaaggtgaaattgaagctcacacagatgtttatcacaacctggatgaaaacagccaaaaaatcctgagatccctggaaggttccgatgatgcagtcctgttacaaagacgtttggataacatgaacttcaagtggagtgaacttcggaaaaagtctctcaacattaggtcccatttggaagccagttctgaccagtggaagcgtctgggtccagcatctcagcactttctttccacgtctgtccagggtccctgggagagagccatctcgccaaacaaagtgccctactatatcaaccacgagactcaaacaacttgctgggaccatcccaaaatgacagagctctaccagtctttagctgacctgaataatgtcagattctcagcttataggactgccatgaaactccgaagactgcagaaggccctttgcttggatctcttgagcctgtcagctgcatgtgatgccttggaccagcacaacctcaagcaaaatgaccagcccatggatatcctgcagattattaattgtttgaccactatttatgaccgcctggagcaagagcacaacaatttggtcaacgtccctctctgcgtggatatgtgtctgaactggctgctgaatgtttatgatacgggacgaacagggaggatccgtgtcctgtcttttaaaactggcatcatttccctgtgtaaagcacatttggaagacaagtacagataccttttcaagcaagtggcaagttcaacaggattttgtgaccagcgcaggctgggcctccttctgcatgattctatccaaattccaagacagttgggtgaagttgcatcctttgggggcagtaacattgagccaagtgtccggagctgcttccaatttgctaataataagccagagatcgaagcggccctcttcctagactggatgagactggaaccccagtccatggtgtggctgcccgtcctgcacagagtggctgctgcagaaactgccaagcatcaggccaaatgtaacatctgcaaagagtgtccaatcattggattcaggtacaggagtctaaagcactttaattatgacatctgccaaagctgctttttttctggtcgagttgcaaaaggccataaaatgcactatcccatggtggaatattgcactccgactacatcaggagaagatgttcgagactttgccaaggtactaaaaaacaaatttcgaaccaaaaggtattttgcgaagcatccccgaatgggctacctgccagtgcagactgtcttagagggggacaacatggaaactcccgttactctgatcaacttctggccagtagattctgcgcctgcctcgtcccctcagctttcacacgatgatactcattcacgcattgaacattatgctagcaggctagcagaaatggaaaacagcaatggatcttatctaaatgatagcatctctcctaatgagagcatagatgatgaacatttgttaatccagcattactgccaaagtttgaaccaggactcccccctgagccagcctcgtagt

SEQ ID NO: 177 - DNA, 3786 bp, synthetic construct
  source 1..3786: mol_type = other DNA
atggccaagtacggcgagcacgaggccagccccgacaacggccagaacgagttcagcgacatcatcaagagccggagcgacgagcacaacgacgtgcagaagaagaccttcaccaagtggatcaacgcccggttcagcaagagcggcaagccccccatcaacgacatgttcaccgacctgaaggacggccggaagctgctggacctgctggagggcctgaccggcaccagcctgcccaaggagcggggcagcacccgggtgcacgccctgaacaacgtgaaccgggtgctgcaggtgctgcaccagaacaacgtggagctggtgaacatcggcggcaccgacatcgtggacggcaaccacaagctgaccctgggcctgctgtggagcatcatcctgcactggcaggtgaaggacgtgatgaaggacgtgatgagcgacctgcagcagaccaacagcgagaagatcctgctgagctgggtgcggcagaccacccggccctacagccaggtgaacgtgctgaacttcaccaccagctggaccgacggcctggccttcaacgccgtgctgcaccggcacaagcccgacctgttcagctgggacaaggtggtgaagatgagccccatcgagcggctggagcacgccttcagcaaggcccagacctacctgggcatcgagaagctgctggaccccgaggacgtggccgtgcagctgcccgacaagaagagcatcatcatgtacctgaccagcctgttcgaggtgctgccccagcaggtgaccatcgacgccatccgggaggtggagaccctgccccggaagtacaagaaggagtgcgaggaggaggccatcaacatccagagcaccgcccccgaggaggagcacgagagcccccgggccgagacccccagcaccgtgaccgaggtggacatggacctggacagctaccagatcgccctggaggaggtgctgacctggctgctgagcgccgaggacaccttccaggagcaggacgacatcagcgacgacgtggaggaggtgaaggaccagttcgccacccacgaggccttcatgatggagctgaccgcccaccagagcagcgtgggcagcgtgctgcaggccggcaaccagctgatcacccagggcaccctgagcgacgaggaggagttcgagatccaggagcagatgaccctgctgaacgcccggtgggaggccctgcgggtggagagcatggaccggcagagccggctgcacgacgtgctgatggagctgcagaagaagcagctgcagcagctgagcgcctggctgaccctgaccgaggagcggatccagaagatggagacctgccccctggacgacgacgtgaagagcctgcagaagctgctggaggagcacaagagcctgcagagcgacctggaggccgagcaggtgaaggtgaacagcctgacccacatggtggtgatcgtggacgagaacagcggcgagagcgccaccgccatcctggaggaccagctgcagaagctgggcgagcggtggaccgccgtgtgccggtggaccgaggagcggtggaaccggctgcaggagatcgccgctagcgcccggttcgaccggagcgtggagaagtggcggcggttccactacgacatcaagatcttcaaccagtggctgaccgaggccgagcagttcctgcggaagacccagatccccgagaactgggagcacgccaagtacaagtggtacctgaaggagctgcaggacggcatcggccagcggcagaccgtggtgcggaccctgaacgccaccggcgaggagatcatccagcagagcagcaagaccgacgccagcatcctgcaggagaagctgggcagcctgaacctgcggtggcaggaggtgtgcaagcagctgagcgaccggaagaagcggctggaggagcagaagcagcccgacctggcccccggcctgaccaccatcggcgccagccccacccagaccgtgaccctggtgacccagcccgtggtgaccaaggagaccgccatcagcaagctggagatgcccagcagcctgatgctggaggtgcccgaggagacccaccggctgctgcagcagttccccctggacctggagaagttcctggcctggctgaccgaggccgagaccaccgccaacgtgctgcaggacgccacccggaaggagcggctgctggaggacagcaagggcgtgaaggagctgatgaagcagtggcaggacctgcagggcgagatcgaggcccacaccgacgtgtaccacaacctggacgagaacagccagaagatcctgcggagcctggagggcagcgacgacgccgtgctgctgcagcggcggctggacaacatgaacttcaagtggagcgagctgcggaagaagagcctgaacatccggagccacctggaggccagcagcgaccagtggaagcggctgggccccgccagccagcacttcctgagcaccagcgtgcagggcccctgggagcgggccatcagccccaacaaggtgccctactacatcaaccacgagacccagaccacctgctgggaccaccccaagatgaccgagctgtaccagagcctggccgacctgaacaacgtgcggttcagcgcctaccggaccgccatgaagctgcggcggctgcagaaggccctgtgcctggacctgctgagcctgagcgccgcctgcgacgccctggaccagcacaacctgaagcagaacgaccagcccatggacatcctgcagatcatcaactgcctgaccaccatctacgaccggctggagcaggagcacaacaacctggtgaacgtgcccctgtgcgtggacatgtgcctgaactggctgctgaacgtgtacgacaccggccggaccggccggatccgggtgctgagcttcaagaccggcatcatcagcctgtgcaaggcccacctggaggacaagtaccggtacctgttcaagcaggtggccagcagcaccggcttctgcgaccagcggcggctgggcctgctgctgcacgacagcatccagatcccccggcagctgggcgaggtggccagcttcggcggcagcaacatcgagcccagcgtgcggagctgcttccagttcgccaacaacaagcccgagatcgaggccgccctgttcctggactggatgcggctggagccccagagcatggtgtggctgcccgtgctgcaccgggtggccgccgccgagaccgccaagcaccaggccaagtgcaacatctgcaaggagtgccccatcatcggcttccggtaccggagcctgaagcacttcaactacgacatctgccagagctgcttcttcagcggccgggtggccaagggccacaagatgcactaccccatggtggagtactgcacccccaccaccagcggcgaggacgtgcgggacttcgccaaggtgctgaagaacaagttccggaccaagcggtacttcgccaagcacccccggatgggctacctgcccgtgcagaccgtgctggagggcgacaacatggagacccccgtgaccctgatcaacttctggcccgtggacagcgcccccgccagcagcccccagctgagccacgacgacacccacagccggatcgagcactacgccagccggctggccgagatggagaacagcaacggcagctacctgaacgacagcatcagccccaacgagagcatcgacgacgagcacctgctgatccagcactactgccagagcctgaaccaggacagccccctgagccagccccggagc

SEQ ID NO: 178 - DNA, 3780 bp, Homo sapiens
  source 1..3780: mol_type = genomic DNA
atggccaagtatggagaacatgaagccagtcctgacaatgggcagaacgaattcagtgatatcattaagtccagatctgatgaacacaatgacgtacagaagaaaacctttaccaaatggataaatgctcgattttcaaagagtgggaaaccacccatcaatgatatgttcacagacctcaaagatggaaggaagctattggatcttctagaaggcctcacaggaacatcactgccaaaggaacgtggttccacaagggtacatgccttaaataacgtcaacagagtgctgcaggttttacatcagaacaatgtggaattagtgaatatagggggaactgacattgtggatggaaatcacaaactgactttggggttactttggagcatcattttgcactggcaggtgaaagatgtcatgaaggatgtcatgtcggacctgcagcagacgaacagtgagaagatcctgctcagctgggtgcgtcagaccaccaggccctacagccaagtcaacgtcctcaacttcaccaccagctggacagatggactcgcctttaatgctgtcctccaccgacataaacctgatctcttcagctgggataaagttgtcaaaatgtcaccaattgagagacttgaacatgccttcagcaaggctcaaacttatttgggaattgaaaagctgttagatcctgaagatgttgccgttcagcttcctgacaagaaatccataattatgtatttaacatctttgtttgaggtgctacctcagcaagtcaccatagacgccatccgtgaggtagagacactcccaaggaaatataaaaaagaatgtgaagaagaggcaattaatatacagagtacagcgcctgaggaggagcatgagagtccccgagctgaaactcccagcactgtcactgaggttgacatggatctggacagctatcagattgcgttggaggaagtgctgacctggttgctttctgctgaggacactttccaggagcaggatgatatttctgatgatgttgaagaagtcaaagaccagtttgcaacccatgaagcttttatgatggaactgactgcacaccagagcagtgtgggcagcgtcctgcaggcaggcaaccaactgataacacaaggaactctgtcagacgaagaagaatttgagattcaggaacagatgaccctgctgaatgctagatgggaggctcttagggtggagagtatggacagacagtcccggctgcacgatgtgctgatggccgctagcgcccgatttgacagatctgttgagaaatggcggcgttttcattatgatataaagatatttaatcagtggctaacagaagctgaacagtttctcagaaagacacaaattcctgagaattgggaacatgctaaatacaaatggtatcttaaggaactccaggatggcattgggcagcggcaaactgttgtcagaacattgaatgcaactggggaagaaataattcagcaatcctcaaaaacagatgccagtattctacaggaaaaattgggaagcctgaatctgcggtggcaggaggtctgcaaacagctgtcagacagaaaaaagaggctagaagaacaaaagcagcctgacctagctcctggactgaccactattggagcctctcctactcagactgttactctggtgacacaacctgtggttactaaggaaactgccatctccaaactagaaatgccatcttccttgatgttggaggtacctaaggattcaacacaatggctggaagctaaggaagaagctgagcaggtcttaggacaggccagagccaagcttgagtcatggaaggagggtccctatacagtagatgcaatccaaaagaaaatcacagaaaccaagcagttggccaaagacctccgccagtggcagacaaatgtagatgtggcaaatgacttggccctgaaacttctccgggattattctgcagatgataccagaaaagtccacatgataacagagaatatcaatgcctcttggagaagcattcataaaagggtgagtgagcgagaggctgctttggaagaaactcatagattactgcaacagttccccctggacctggaaaagtttcttgcctggcttacagaagctgaaacaactgccaatgtcctacaggatgctacccgtaaggaaaggctcctagaagactccaagggagtaaaagagctgatgaaacaatggcaagacctccaaggtgaaattgaagctcacacagatgtttatcacaacctggatgaaaacagccaaaaaatcctgagatccctggaaggttccgatgatgcagtcctgttacaaagacgtttggataacatgaacttcaagtggagtgaacttcggaaaaagtctctcaacattaggtcccatttggaagccagttctgaccagtggaagcgtctgggtccagcatctcagcactttctttccacgtctgtccagggtccctgggagagagccatctcgccaaacaaagtgccctactatatcaaccacgagactcaaacaacttgctgggaccatcccaaaatgacagagctctaccagtctttagctgacctgaataatgtcagattctcagcttataggactgccatgaaactccgaagactgcagaaggccctttgcttggatctcttgagcctgtcagctgcatgtgatgccttggaccagcacaacctcaagcaaaatgaccagcccatggatatcctgcagattattaattgtttgaccactatttatgaccgcctggagcaagagcacaacaatttggtcaacgtccctctctgcgtggatatgtgtctgaactggctgctgaatgtttatgatacgggacgaacagggaggatccgtgtcctgtcttttaaaactggcatcatttccctgtgtaaagcacatttggaagacaagtacagataccttttcaagcaagtggcaagttcaacaggattttgtgaccagcgcaggctgggcctccttctgcatgattctatccaaattccaagacagttgggtgaagttgcatcctttgggggcagtaacattgagccaagtgtccggagctgcttccaatttgctaataataagccagagatcgaagcggccctcttcctagactggatgagactggaaccccagtccatggtgtggctgcccgtcctgcacagagtggctgctgcagaaactgccaagcatcaggccaaatgtaacatctgcaaagagtgtccaatcattggattcaggtacaggagtctaaagcactttaattatgacatctgccaaagctgctttttttctggtcgagttgcaaaaggccataaaatgcactatcccatggtggaatattgcactccgactacatcaggagaagatgttcgagactttgccaaggtactaaaaaacaaatttcgaaccaaaaggtattttgcgaagcatccccgaatgggctacctgccagtgcagactgtcttagagggggacaacatggaaactcccgttactctgatcaacttctggccagtagattctgcgcctgcctcgtcccctcagctttcacacgatgatactcattcacgcattgaacattatgctagcaggctagcagaaatggaaaacagcaatggatcttatctaaatgatagcatctctcctaatgagagcatagatgatgaacatttgttaatccagcattactgccaaagtttgaaccaggactcccccctgagccagcctcgtagt

SEQ ID NO: 179 - DNA, 3780 bp, synthetic construct
  source 1..3780: mol_type = other DNA
atggccaagtacggcgagcacgaggccagccccgacaacggccagaacgagttcagcgacatcatcaagagccggagcgacgagcacaacgacgtgcagaagaagaccttcaccaagtggatcaacgcccggttcagcaagagcggcaagccccccatcaacgacatgttcaccgacctgaaggacggccggaagctgctggacctgctggagggcctgaccggcaccagcctgcccaaggagcggggcagcacccgggtgcacgccctgaacaacgtgaaccgggtgctgcaggtgctgcaccagaacaacgtggagctggtgaacatcggcggcaccgacatcgtggacggcaaccacaagctgaccctgggcctgctgtggagcatcatcctgcactggcaggtgaaggacgtgatgaaggacgtgatgagcgacctgcagcagaccaacagcgagaagatcctgctgagctgggtgcggcagaccacccggccctacagccaggtgaacgtgctgaacttcaccaccagctggaccgacggcctggccttcaacgccgtgctgcaccggcacaagcccgacctgttcagctgggacaaggtggtgaagatgagccccatcgagcggctggagcacgccttcagcaaggcccagacctacctgggcatcgagaagctgctggaccccgaggacgtggccgtgcagctgcccgacaagaagagcatcatcatgtacctgaccagcctgttcgaggtgctgccccagcaggtgaccatcgacgccatccgggaggtggagaccctgccccggaagtacaagaaggagtgcgaggaggaggccatcaacatccagagcaccgcccccgaggaggagcacgagagcccccgggccgagacccccagcaccgtgaccgaggtggacatggacctggacagctaccagatcgccctggaggaggtgctgacctggctgctgagcgccgaggacaccttccaggagcaggacgacatcagcgacgacgtggaggaggtgaaggaccagttcgccacccacgaggccttcatgatggagctgaccgcccaccagagcagcgtgggcagcgtgctgcaggccggcaaccagctgatcacccagggcaccctgagcgacgaggaggagttcgagatccaggagcagatgaccctgctgaacgcccggtgggaggccctgcgggtggagagcatggaccggcagagccggctgcacgacgtgctgatggccgctagcgcccggttcgaccggagcgtggagaagtggcggcggttccactacgacatcaagatcttcaaccagtggctgaccgaggccgagcagttcctgcggaagacccagatccccgagaactgggagcacgccaagtacaagtggtacctgaaggagctgcaggacggcatcggccagcggcagaccgtggtgcggaccctgaacgccaccggcgaggagatcatccagcagagcagcaagaccgacgccagcatcctgcaggagaagctgggcagcctgaacctgcggtggcaggaggtgtgcaagcagctgagcgaccggaagaagcggctggaggagcagaagcagcccgacctggcccccggcctgaccaccatcggcgccagccccacccagaccgtgaccctggtgacccagcccgtggtgaccaaggagaccgccatcagcaagctggagatgcccagcagcctgatgctggaggtgcccaaggacagcacccagtggctggaggccaaggaggaggccgagcaggtgctgggccaggcccgggccaagctggagagctggaaggagggcccctacaccgtggacgccatccagaagaagatcaccgagaccaagcagctggccaaggacctgcggcagtggcagaccaacgtggacgtggccaacgacctggccctgaagctgctgcgggactacagcgccgacgacacccggaaggtgcacatgatcaccgagaacatcaacgccagctggcggagcatccacaagcgggtgagcgagcgggaggccgccctggaggagacccaccggctgctgcagcagttccccctggacctggagaagttcctggcctggctgaccgaggccgagaccaccgccaacgtgctgcaggacgccacccggaaggagcggctgctggaggacagcaagggcgtgaaggagctgatgaagcagtggcaggacctgcagggcgagatcgaggcccacaccgacgtgtaccacaacctggacgagaacagccagaagatcctgcggagcctggagggcagcgacgacgccgtgctgctgcagcggcggctggacaacatgaacttcaagtggagcgagctgcggaagaagagcctgaacatccggagccacctggaggccagcagcgaccagtggaagcggctgggccccgccagccagcacttcctgagcaccagcgtgcagggcccctgggagcgggccatcagccccaacaaggtgccctactacatcaaccacgagacccagaccacctgctgggaccaccccaagatgaccgagctgtaccagagcctggccgacctgaacaacgtgcggttcagcgcctaccggaccgccatgaagctgcggcggctgcagaaggccctgtgcctggacctgctgagcctgagcgccgcctgcgacgccctggaccagcacaacctgaagcagaacgaccagcccatggacatcctgcagatcatcaactgcctgaccaccatctacgaccggctggagcaggagcacaacaacctggtgaacgtgcccctgtgcgtggacatgtgcctgaactggctgctgaacgtgtacgacaccggccggaccggccggatccgggtgctgagcttcaagaccggcatcatcagcctgtgcaaggcccacctggaggacaagtaccggtacctgttcaagcaggtggccagcagcaccggcttctgcgaccagcggcggctgggcctgctgctgcacgacagcatccagatcccccggcagctgggcgaggtggccagcttcggcggcagcaacatcgagcccagcgtgcggagctgcttccagttcgccaacaacaagcccgagatcgaggccgccctgttcctggactggatgcggctggagccccagagcatggtgtggctgcccgtgctgcaccgggtggccgccgccgagaccgccaagcaccaggccaagtgcaacatctgcaaggagtgccccatcatcggcttccggtaccggagcctgaagcacttcaactacgacatctgccagagctgcttcttcagcggccgggtggccaagggccacaagatgcactaccccatggtggagtactgcacccccaccaccagcggcgaggacgtgcgggacttcgccaaggtgctgaagaacaagttccggaccaagcggtacttcgccaagcacccccggatgggctacctgcccgtgcagaccgtgctggagggcgacaacatggagacccccgtgaccctgatcaacttctggcccgtggacagcgcccccgccagcagcccccagctgagccacgacgacacccacagccggatcgagcactacgccagccggctggccgagatggagaacagcaacggcagctacctgaacgacagcatcagccccaacgagagcatcgacgacgagcacctgctgatccagcactactgccagagcctgaaccaggacagccccctgagccagccccggagc

SEQ ID NO: 180 - DNA, 3975 bp, Homo sapiens
  source 1..3975: mol_type = genomic DNA
atggccaagtatggagaacatgaagccagtcctgacaatgggcagaacgaattcagtgatatcattaagtccagatctgatgaacacaatgacgtacagaagaaaacctttaccaaatggataaatgctcgattttcaaagagtgggaaaccacccatcaatgatatgttcacagacctcaaagatggaaggaagctattggatcttctagaaggcctcacaggaacatcactgccaaaggaacgtggttccacaagggtacatgccttaaataacgtcaacagagtgctgcaggttttacatcagaacaatgtggaattagtgaatatagggggaactgacattgtggatggaaatcacaaactgactttggggttactttggagcatcattttgcactggcaggtgaaagatgtcatgaaggatgtcatgtcggacctgcagcagacgaacagtgagaagatcctgctcagctgggtgcgtcagaccaccaggccctacagccaagtcaacgtcctcaacttcaccaccagctggacagatggactcgcctttaatgctgtcctccaccgacataaacctgatctcttcagctgggataaagttgtcaaaatgtcaccaattgagagacttgaacatgccttcagcaaggctcaaacttatttgggaattgaaaagctgttagatcctgaagatgttgccgttcagcttcctgacaagaaatccataattatgtatttaacatctttgtttgaggtgctacctcagcaagtcaccatagacgccatccgtgaggtagagacactcccaaggaaatataaaaaagaatgtgaagaagaggcaattaatatacagagtacagcgcctgaggaggagcatgagagtccccgagctgaaactcccagcactgtcactgaggttgacatggatctggacagctatcagattgcgttggaggaagtgctgacctggttgctttctgctgaggacactttccaggagcaggatgatatttctgatgatgttgaagaagtcaaagaccagtttgcaacccatgaagcttttatgatggaactgactgcacaccagagcagtgtgggcagcgtcctgcaggcaggcaaccaactgataacacaaggaactctgtcagacgaagaagaatttgagattcaggaacagatgaccctgctgaatgctagatgggaggctcttagggtggagagtatggacagacagtcccggctgcacgatgtgctgatggaactgcagaagaagcaactgcagcagctctccgcctggttaacactcacagaggagcgcattcagaagatggaaacttgccccctggatgatgatgtaaaatctctacaaaagctgctagaagaacataaaagtttgcaaagtgatcttgaggctgaacaggtgaaagtaaattcactaactcacatggtggtcattgttgatgaaaacagtggtgagagtgctacagctatcctagaagaccagttacagaaacttggtgagcgctggacagcagtatgccgttggactgaagaacgctggaataggttacaagaaatcgccgctagcgcccgatttgacagatctgttgagaaatggcggcgttttcattatgatataaagatatttaatcagtggctaacagaagctgaacagtttctcagaaagacacaaattcctgagaattgggaacatgctaaatacaaatggtatcttaaggaactccaggatggcattgggcagcggcaaactgttgtcagaacattgaatgcaactggggaagaaataattcagcaatcctcaaaaacagatgccagtattctacaggaaaaattgggaagcctgaatctgcggtggcaggaggtctgcaaacagctgtcagacagaaaaaagaggctagaagaacaaaagcagcctgacctagctcctggactgaccactattggagcctctcctactcagactgttactctggtgacacaacctgtggttactaaggaaactgccatctccaaactagaaatgccatcttccttgatgttggaggtacctgaagaaactcatagattactgcaacagttccccctggacctggaaaagtttcttgcctggcttacagaagctgaaacaactgccaatgtcctacaggatgctacccgtaaggaaaggctcctagaagactccaagggagtaaaagagctgatgaaacaatggcaagacctccaaggtgaaattgaagctcacacagatgtttatcacaacctggatgaaaacagccaaaaaatcctgagatccctggaaggttccgatgatgcagtcctgttacaaagacgtttggataacatgaacttcaagtggagtgaacttcggaaaaagtctctcaacattaggtcccatttggaagccagttctgaccagtggaagcgtctgggtccagcatctcagcactttctttccacgtctgtccagggtccctgggagagagccatctcgccaaacaaagtgccctactatatcaaccacgagactcaaacaacttgctgggaccatcccaaaatgacagagctctaccagtctttagctgacctgaataatgtcagattctcagcttataggactgccatgaaactccgaagactgcagaaggccctttgcttggatctcttgagcctgtcagctgcatgtgatgccttggaccagcacaacctcaagcaaaatgaccagcccatggatatcctgcagattattaattgtttgaccactatttatgaccgcctggagcaagagcacaacaatttggtcaacgtccctctctgcgtggatatgtgtctgaactggctgctgaatgtttatgatacgggacgaacagggaggatccgtgtcctgtcttttaaaactggcatcatttccctgtgtaaagcacatttggaagacaagtacagataccttttcaagcaagtggcaagttcaacaggattttgtgaccagcgcaggctgggcctccttctgcatgattctatccaaattccaagacagttgggtgaagttgcatcctttgggggcagtaacattgagccaagtgtccggagctgcttccaatttgctaataataagccagagatcgaagcggccctcttcctagactggatgagactggaaccccagtccatggtgtggctgcccgtcctgcacagagtggctgctgcagaaactgccaagcatcaggccaaatgtaacatctgcaaagagtgtccaatcattggattcaggtacaggagtctaaagcactttaattatgacatctgccaaagctgctttttttctggtcgagttgcaaaaggccataaaatgcactatcccatggtggaatattgcactccgactacatcaggagaagatgttcgagactttgccaaggtactaaaaaacaaatttcgaaccaaaaggtattttgcgaagcatccccgaatgggctacctgccagtgcagactgtcttagagggggacaacatggaaactcccgttactctgatcaacttctggccagtagattctgcgcctgcctcgtcccctcagctttcacacgatgatactcattcacgcattgaacattatgctagcaggctagcagaaatggaaaacagcaatggatcttatctaaatgatagcatctctcctaatgagagcatagatgatgaacatttgttaatccagcattactgccaaagtttgaaccaggactcccccctgagccagcctcgtagtcctgcccagatcttgatttccttagagagtgaggaaagaggggagctagagagaatcctagcagatcttgaggaagaaaacaggaatctgcaagcagaatatgaccgtctaaagcagcagcacgaacataaaggcctgtccccactgccgtcccctcctgaaatgatgcccacctctccccagagtccc

SEQ ID NO: 181 - DNA, 3975 bp, synthetic construct
  source 1..3975: mol_type = other DNA
atggccaagtacggcgagcacgaggccagccccgacaacggccagaacgagttcagcgacatcatcaagagccggagcgacgagcacaacgacgtgcagaagaagaccttcaccaagtggatcaacgcccggttcagcaagagcggcaagccccccatcaacgacatgttcaccgacctgaaggacggccggaagctgctggacctgctggagggcctgaccggcaccagcctgcccaaggagcggggcagcacccgggtgcacgccctgaacaacgtgaaccgggtgctgcaggtgctgcaccagaacaacgtggagctggtgaacatcggcggcaccgacatcgtggacggcaaccacaagctgaccctgggcctgctgtggagcatcatcctgcactggcaggtgaaggacgtgatgaaggacgtgatgagcgacctgcagcagaccaacagcgagaagatcctgctgagctgggtgcggcagaccacccggccctacagccaggtgaacgtgctgaacttcaccaccagctggaccgacggcctggccttcaacgccgtgctgcaccggcacaagcccgacctgttcagctgggacaaggtggtgaagatgagccccatcgagcggctggagcacgccttcagcaaggcccagacctacctgggcatcgagaagctgctggaccccgaggacgtggccgtgcagctgcccgacaagaagagcatcatcatgtacctgaccagcctgttcgaggtgctgccccagcaggtgaccatcgacgccatccgggaggtggagaccctgccccggaagtacaagaaggagtgcgaggaggaggccatcaacatccagagcaccgcccccgaggaggagcacgagagcccccgggccgagacccccagcaccgtgaccgaggtggacatggacctggacagctaccagatcgccctggaggaggtgctgacctggctgctgagcgccgaggacaccttccaggagcaggacgacatcagcgacgacgtggaggaggtgaaggaccagttcgccacccacgaggccttcatgatggagctgaccgcccaccagagcagcgtgggcagcgtgctgcaggccggcaaccagctgatcacccagggcaccctgagcgacgaggaggagttcgagatccaggagcagatgaccctgctgaacgcccggtgggaggccctgcgggtggagagcatggaccggcagagccggctgcacgacgtgctgatggagctgcagaagaagcagctgcagcagctgagcgcctggctgaccctgaccgaggagcggatccagaagatggagacctgccccctggacgacgacgtgaagagcctgcagaagctgctggaggagcacaagagcctgcagagcgacctggaggccgagcaggtgaaggtgaacagcctgacccacatggtggtgatcgtggacgagaacagcggcgagagcgccaccgccatcctggaggaccagctgcagaagctgggcgagcggtggaccgccgtgtgccggtggaccgaggagcggtggaaccggctgcaggagatcgccgctagcgcccggttcgaccggagcgtggagaagtggcggcggttccactacgacatcaagatcttcaaccagtggctgaccgaggccgagcagttcctgcggaagacccagatccccgagaactgggagcacgccaagtacaagtggtacctgaaggagctgcaggacggcatcggccagcggcagaccgtggtgcggaccctgaacgccaccggcgaggagatcatccagcagagcagcaagaccgacgccagcatcctgcaggagaagctgggcagcctgaacctgcggtggcaggaggtgtgcaagcagctgagcgaccggaagaagcggctggaggagcagaagcagcccgacctggcccccggcctgaccaccatcggcgccagccccacccagaccgtgaccctggtgacccagcccgtggtgaccaaggagaccgccatcagcaagctggagatgcccagcagcctgatgctggaggtgcccgaggagacccaccggctgctgcagcagttccccctggacctggagaagttcctggcctggctgaccgaggccgagaccaccgccaacgtgctgcaggacgccacccggaaggagcggctgctggaggacagcaagggcgtgaaggagctgatgaagcagtggcaggacctgcagggcgagatcgaggcccacaccgacgtgtaccacaacctggacgagaacagccagaagatcctgcggagcctggagggcagcgacgacgccgtgctgctgcagcggcggctggacaacatgaacttcaagtggagcgagctgcggaagaagagcctgaacatccggagccacctggaggccagcagcgaccagtggaagcggctgggccccgccagccagcacttcctgagcaccagcgtgcagggcccctgggagcgggccatcagccccaacaaggtgccctactacatcaaccacgagacccagaccacctgctgggaccaccccaagatgaccgagctgtaccagagcctggccgacctgaacaacgtgcggttcagcgcctaccggaccgccatgaagctgcggcggctgcagaaggccctgtgcctggacctgctgagcctgagcgccgcctgcgacgccctggaccagcacaacctgaagcagaacgaccagcccatggacatcctgcagatcatcaactgcctgaccaccatctacgaccggctggagcaggagcacaacaacctggtgaacgtgcccctgtgcgtggacatgtgcctgaactggctgctgaacgtgtacgacaccggccggaccggccggatccgggtgctgagcttcaagaccggcatcatcagcctgtgcaaggcccacctggaggacaagtaccggtacctgttcaagcaggtggccagcagcaccggcttctgcgaccagcggcggctgggcctgctgctgcacgacagcatccagatcccccggcagctgggcgaggtggccagcttcggcggcagcaacatcgagcccagcgtgcggagctgcttccagttcgccaacaacaagcccgagatcgaggccgccctgttcctggactggatgcggctggagccccagagcatggtgtggctgcccgtgctgcaccgggtggccgccgccgagaccgccaagcaccaggccaagtgcaacatctgcaaggagtgccccatcatcggcttccggtaccggagcctgaagcacttcaactacgacatctgccagagctgcttcttcagcggccgggtggccaagggccacaagatgcactaccccatggtggagtactgcacccccaccaccagcggcgaggacgtgcgggacttcgccaaggtgctgaagaacaagttccggaccaagcggtacttcgccaagcacccccggatgggctacctgcccgtgcagaccgtgctggagggcgacaacatggagacccccgtgaccctgatcaacttctggcccgtggacagcgcccccgccagcagcccccagctgagccacgacgacacccacagccggatcgagcactacgccagccggctggccgagatggagaacagcaacggcagctacctgaacgacagcatcagccccaacgagagcatcgacgacgagcacctgctgatccagcactactgccagagcctgaaccaggacagccccctgagccagccccggagccccgcccagatcctgatcagcctggagagcgaggagcggggcgagctggagcggatcctggccgacctggaggaggagaaccggaacctgcaggccgagtacgaccggctgaagcagcagcacgagcacaagggcctgagccccctgcccagcccccccgagatgatgcccaccagcccccagagcccc

SEQ ID NO: 182 - DNA, 3969 bp, Homo sapiens
  source 1..3969: mol_type = genomic DNA
atggccaagtatggagaacatgaagccagtcctgacaatgggcagaacgaattcagtgatatcattaagtccagatctgatgaacacaatgacgtacagaagaaaacctttaccaaatggataaatgctcgattttcaaagagtgggaaaccacccatcaatgatatgttcacagacctcaaagatggaaggaagctattggatcttctagaaggcctcacaggaacatcactgccaaaggaacgtggttccacaagggtacatgccttaaataacgtcaacagagtgctgcaggttttacatcagaacaatgtggaattagtgaatatagggggaactgacattgtggatggaaatcacaaactgactttggggttactttggagcatcattttgcactggcaggtgaaagatgtcatgaaggatgtcatgtcggacctgcagcagacgaacagtgagaagatcctgctcagctgggtgcgtcagaccaccaggccctacagccaagtcaacgtcctcaacttcaccaccagctggacagatggactcgcctttaatgctgtcctccaccgacataaacctgatctcttcagctgggataaagttgtcaaaatgtcaccaattgagagacttgaacatgccttcagcaaggctcaaacttatttgggaattgaaaagctgttagatcctgaagatgttgccgttcagcttcctgacaagaaatccataattatgtatttaacatctttgtttgaggtgctacctcagcaagtcaccatagacgccatccgtgaggtagagacactcccaaggaaatataaaaaagaatgtgaagaagaggcaattaatatacagagtacagcgcctgaggaggagcatgagagtccccgagctgaaactcccagcactgtcactgaggttgacatggatctggacagctatcagattgcgttggaggaagtgctgacctggttgctttctgctgaggacactttccaggagcaggatgatatttctgatgatgttgaagaagtcaaagaccagtttgcaacccatgaagcttttatgatggaactgactgcacaccagagcagtgtgggcagcgtcctgcaggcaggcaaccaactgataacacaaggaactctgtcagacgaagaagaatttgagattcaggaacagatgaccctgctgaatgctagatgggaggctcttagggtggagagtatggacagacagtcccggctgcacgatgtgctgatggccgctagcgcccgatttgacagatctgttgagaaatggcggcgttttcattatgatataaagatatttaatcagtggctaacagaagctgaacagtttctcagaaagacacaaattcctgagaattgggaacatgctaaatacaaatggtatcttaaggaactccaggatggcattgggcagcggcaaactgttgtcagaacattgaatgcaactggggaagaaataattcagcaatcctcaaaaacagatgccagtattctacaggaaaaattgggaagcctgaatctgcggtggcaggaggtctgcaaacagctgtcagacagaaaaaagaggctagaagaacaaaagcagcctgacctagctcctggactgaccactattggagcctctcctactcagactgttactctggtgacacaacctgtggttactaaggaaactgccatctccaaactagaaatgccatcttccttgatgttggaggtacctaaggattcaacacaatggctggaagctaaggaagaagctgagcaggtcttaggacaggccagagccaagcttgagtcatggaaggagggtccctatacagtagatgcaatccaaaagaaaatcacagaaaccaagcagttggccaaagacctccgccagtggcagacaaatgtagatgtggcaaatgacttggccctgaaacttctccgggattattctgcagatgataccagaaaagtccacatgataacagagaatatcaatgcctcttggagaagcattcataaaagggtgagtgagcgagaggctgctttggaagaaactcatagattactgcaacagttccccctggacctggaaaagtttcttgcctggcttacagaagctgaaacaactgccaatgtcctacaggatgctacccgtaaggaaaggctcctagaagactccaagggagtaaaagagctgatgaaacaatggcaagacctccaaggtgaaattgaagctcacacagatgtttatcacaacctggatgaaaacagccaaaaaatcctgagatccctggaaggttccgatgatgcagtcctgttacaaagacgtttggataacatgaacttcaagtggagtgaacttcggaaaaagtctctcaacattaggtcccatttggaagccagttctgaccagtggaagcgtctgggtccagcatctcagcactttctttccacgtctgtccagggtccctgggagagagccatctcgccaaacaaagtgccctactatatcaaccacgagactcaaacaacttgctgggaccatcccaaaatgacagagctctaccagtctttagctgacctgaataatgtcagattctcagcttataggactgccatgaaactccgaagactgcagaaggccctttgcttggatctcttgagcctgtcagctgcatgtgatgccttggaccagcacaacctcaagcaaaatgaccagcccatggatatcctgcagattattaattgtttgaccactatttatgaccgcctggagcaagagcacaacaatttggtcaacgtccctctctgcgtggatatgtgtctgaactggctgctgaatgtttatgatacgggacgaacagggaggatccgtgtcctgtcttttaaaactggcatcatttccctgtgtaaagcacatttggaagacaagtacagataccttttcaagcaagtggcaagttcaacaggattttgtgaccagcgcaggctgggcctccttctgcatgattctatccaaattccaagacagttgggtgaagttgcatcctttgggggcagtaacattgagccaagtgtccggagctgcttccaatttgctaataataagccagagatcgaagcggccctcttcctagactggatgagactggaaccccagtccatggtgtggctgcccgtcctgcacagagtggctgctgcagaaactgccaagcatcaggccaaatgtaacatctgcaaagagtgtccaatcattggattcaggtacaggagtctaaagcactttaattatgacatctgccaaagctgctttttttctggtcgagttgcaaaaggccataaaatgcactatcccatggtggaatattgcactccgactacatcaggagaagatgttcgagactttgccaaggtactaaaaaacaaatttcgaaccaaaaggtattttgcgaagcatccccgaatgggctacctgccagtgcagactgtcttagagggggacaacatggaaactcccgttactctgatcaacttctggccagtagattctgcgcctgcctcgtcccctcagctttcacacgatgatactcattcacgcattgaacattatgctagcaggctagcagaaatggaaaacagcaatggatcttatctaaatgatagcatctctcctaatgagagcatagatgatgaacatttgttaatccagcattactgccaaagtttgaaccaggactcccccctgagccagcctcgtagtcctgcccagatcttgatttccttagagagtgaggaaagaggggagctagagagaatcctagcagatcttgaggaagaaaacaggaatctgcaagcagaatatgaccgtctaaagcagcagcacgaacataaaggcctgtccccactgccgtcccctcctgaaatgatgcccacctctccccagagtccc

SEQ ID NO: 183 - DNA, 4290 bp, synthetic construct
  source 1..4290: mol_type = other DNA
atggccaagtacggcgagcacgaggccagccccgacaacggccagaacgagttcagcgacatcatcaagagccggagcgacgagcacaacgacgtgcagaagaagaccttcaccaagtggatcaacgcccggttcagcaagagcggcaagccccccatcaacgacatgttcaccgacctgaaggacggccggaagctgctggacctgctggagggcctgaccggcaccagcctgcccaaggagcggggcagcacccgggtgcacgccctgaacaacgtgaaccgggtgctgcaggtgctgcaccagaacaacgtggagctggtgaacatcggcggcaccgacatcgtggacggcaaccacaagctgaccctgggcctgctgtggagcatcatcctgcactggcaggtgaaggacgtgatgaaggacgtgatgagcgacctgcagcagaccaacagcgagaagatcctgctgagctgggtgcggcagaccacccggccctacagccaggtgaacgtgctgaacttcaccaccagctggaccgacggcctggccttcaacgccgtgctgcaccggcacaagcccgacctgttcagctgggacaaggtggtgaagatgagccccatcgagcggctggagcacgccttcagcaaggcccagacctacctgggcatcgagaagctgctggaccccgaggacgtggccgtgcagctgcccgacaagaagagcatcatcatgtacctgaccagcctgttcgaggtgctgccccagcaggtgaccatcgacgccatccgggaggtggagaccctgccccggaagtacaagaaggagtgcgaggaggaggccatcaacatccagagcaccgcccccgaggaggagcacgagagcccccgggccgagacccccagcaccgtgaccgaggtggacatggacctggacagctaccagatcgccctggaggaggtgctgacctggctgctgagcgccgaggacaccttccaggagcaggacgacatcagcgacgacgtggaggaggtgaaggaccagttcgccacccacgaggccttcatgatggagctgaccgcccaccagagcagcgtgggcagcgtgctgcaggccggcaaccagctgatcacccagggcaccctgagcgacgaggaggagttcgagatccaggagcagatgaccctgctgaacgcccggtgggaggccctgcgggtggagagcatggaccggcagagccggctgcacgacgtgctgatggagctgcagaagaagcagctgcagcagctgagcgcctggctgaccctgaccgaggagcggatccagaagatggagacctgccccctggacgacgacgtgaagagcctgcagaagctgctggaggagcacaagagcctgcagagcgacctggaggccgagcaggtgaaggtgaacagcctgacccacatggtggtgatcgtggacgagaacagcggcgagagcgccaccgccatcctggaggaccagctgcagaagctgggcgagcggtggaccgccgtgtgccggtggaccgaggagcggtggaaccggctgcaggagatcgccgctagcgcccggttcgaccggagcgtggagaagtggcggcggttccactacgacatcaagatcttcaaccagtggctgaccgaggccgagcagttcctgcggaagacccagatccccgagaactgggagcacgccaagtacaagtggtacctgaaggagctgcaggacggcatcggccagcggcagaccgtggtgcggaccctgaacgccaccggcgaggagatcatccagcagagcagcaagaccgacgccagcatcctgcaggagaagctgggcagcctgaacctgcggtggcaggaggtgtgcaagcagctgagcgaccggaagaagcggctggaggagcagaagcagcccgacctggcccccggcctgaccaccatcggcgccagccccacccagaccgtgaccctggtgacccagcccgtggtgaccaaggagaccgccatcagcaagctggagatgcccagcagcctgatgctggaggtgcccaaggacagcacccagtggctggaggccaaggaggaggccgagcaggtgctgggccaggcccgggccaagctggagagctggaaggagggcccctacaccgtggacgccatccagaagaagatcaccgagaccaagcagctggccaaggacctgcggcagtggcagaccaacgtggacgtggccaacgacctggccctgaagctgctgcgggactacagcgccgacgacacccggaaggtgcacatgatcaccgagaacatcaacgccagctggcggagcatccacaagcgggtgagcgagcgggaggccgccctggaggagacccaccggctgctgcagcagttccccctggacctggagaagttcctggcctggctgaccgaggccgagaccaccgccaacgtgctgcaggacgccacccggaaggagcggctgctggaggacagcaagggcgtgaaggagctgatgaagcagtggcaggacctgcagggcgagatcgaggcccacaccgacgtgtaccacaacctggacgagaacagccagaagatcctgcggagcctggagggcagcgacgacgccgtgctgctgcagcggcggctggacaacatgaacttcaagtggagcgagctgcggaagaagagcctgaacatccggagccacctggaggccagcagcgaccagtggaagcggctgggccccgccagccagcacttcctgagcaccagcgtgcagggcccctgggagcgggccatcagccccaacaaggtgccctactacatcaaccacgagacccagaccacctgctgggaccaccccaagatgaccgagctgtaccagagcctggccgacctgaacaacgtgcggttcagcgcctaccggaccgccatgaagctgcggcggctgcagaaggccctgtgcctggacctgctgagcctgagcgccgcctgcgacgccctggaccagcacaacctgaagcagaacgaccagcccatggacatcctgcagatcatcaactgcctgaccaccatctacgaccggctggagcaggagcacaacaacctggtgaacgtgcccctgtgcgtggacatgtgcctgaactggctgctgaacgtgtacgacaccggccggaccggccggatccgggtgctgagcttcaagaccggcatcatcagcctgtgcaaggcccacctggaggacaagtaccggtacctgttcaagcaggtggccagcagcaccggcttctgcgaccagcggcggctgggcctgctgctgcacgacagcatccagatcccccggcagctgggcgaggtggccagcttcggcggcagcaacatcgagcccagcgtgcggagctgcttccagttcgccaacaacaagcccgagatcgaggccgccctgttcctggactggatgcggctggagccccagagcatggtgtggctgcccgtgctgcaccgggtggccgccgccgagaccgccaagcaccaggccaagtgcaacatctgcaaggagtgccccatcatcggcttccggtaccggagcctgaagcacttcaactacgacatctgccagagctgcttcttcagcggccgggtggccaagggccacaagatgcactaccccatggtggagtactgcacccccaccaccagcggcgaggacgtgcgggacttcgccaaggtgctgaagaacaagttccggaccaagcggtacttcgccaagcacccccggatgggctacctgcccgtgcagaccgtgctggagggcgacaacatggagacccccgtgaccctgatcaacttctggcccgtggacagcgcccccgccagcagcccccagctgagccacgacgacacccacagccggatcgagcactacgccagccggctggccgagatggagaacagcaacggcagctacctgaacgacagcatcagccccaacgagagcatcgacgacgagcacctgctgatccagcactactgccagagcctgaaccaggacagccccctgagccagccccggagccccgcccagatcctgatcagcctggagagcgaggagcggggcgagctggagcggatcctggccgacctggaggaggagaaccggaacctgcaggccgagtacgaccggctgaagcagcagcacgagcacaagggcctgagccccctgcccagcccccccgagatgatgcccaccagcccccagagcccc

SEQ ID NO: 184 - DNA, 3960 bp, Homo sapiens
  source 1..3960: mol_type = genomic DNA
atggccaagtatggagaacatgaagccagtcctgacaatgggcagaacgaattcagtgatatcattaagtccagatctgatgaacacaatgacgtacagaagaaaacctttaccaaatggataaatgctcgattttcaaagagtgggaaaccacccatcaatgatatgttcacagacctcaaagatggaaggaagctattggatcttctagaaggcctcacaggaacatcactgccaaaggaacgtggttccacaagggtacatgccttaaataacgtcaacagagtgctgcaggttttacatcagaacaatgtggaattagtgaatatagggggaactgacattgtggatggaaatcacaaactgactttggggttactttggagcatcattttgcactggcaggtgaaagatgtcatgaaggatgtcatgtcggacctgcagcagacgaacagtgagaagatcctgctcagctgggtgcgtcagaccaccaggccctacagccaagtcaacgtcctcaacttcaccaccagctggacagatggactcgcctttaatgctgtcctccaccgacataaacctgatctcttcagctgggataaagttgtcaaaatgtcaccaattgagagacttgaacatgccttcagcaaggctcaaacttatttgggaattgaaaagctgttagatcctgaagatgttgccgttcagcttcctgacaagaaatccataattatgtatttaacatctttgtttgaggtgctacctcagcaagtcaccatagacgccatccgtgaggtagagacactcccaaggaaatataaaaaagaatgtgaagaagaggcaattaatatacagagtacagcgcctgaggaggagcatgagagtccccgagctgaaactcccagcactgtcactgaggttgacatggatctggacagctatcagattgcgttggaggaagtgctgacctggttgctttctgctgaggacactttccaggagcaggatgatatttctgatgatgttgaagaagtcaaagaccagtttgcaacccatgaagcttttatgatggaactgactgcacaccagagcagtgtgggcagcgtcctgcaggcaggcaaccaactgataacacaaggaactctgtcagacgaagaagaatttgagattcaggaacagatgaccctgctgaatgctagatgggaggctcttagggtggagagtatggacagacagtcccggctgcacgatgtgctgatggaactgcagaagaagcaactgcagcagctctccgcctggttaacactcacagaggagcgcattcagaagatggaaacttgccccctggatgatgatgtaaaatctctacaaaagctgctagaagaacataaaagtttgcaaagtgatcttgaggctgaacaggtgaaagtaaattcactaactcacatggtggtcattgttgatgaaaacagtggtgagagtgctacagctatcctagaagaccagttacagaaacttggtgagcgctggacagcagtatgccgttggactgaagaacgctggaataggttacaagaaatcgccgctagcgcccgatttgacagatctgttgagaaatggcggcgttttcattatgatataaagatatttaatcagtggctaacagaagctgaacagtttctcagaaagacacaaattcctgagaattgggaacatgctaaatacaaatggtatcttaaggaactccaggatggcattgggcagcggcaaactgttgtcagaacattgaatgcaactggggaagaaataattcagcaatcctcaaaaacagatgccagtattctacaggaaaaattgggaagcctgaatctgcggtggcaggaggtctgcaaacagctgtcagacagaaaaaagaggctagaagaacaaaagaaggattcaacacaatggctggaagctaaggaagaagctgagcaggtcttaggacaggccagagccaagcttgagtcatggaaggagggtccctatacagtagatgcaatccaaaagaaaatcacagaaaccaagcagttggccaaagacctccgccagtggcagacaaatgtagatgtggcaaatgacttggccctgaaacttctccgggattattctgcagatgataccagaaaagtccacatgataacagagaatatcaatgcctcttggagaagcattcataaaagggtgagtgagcgagaggctgctttggaagaaactcatagattactgcaacagttccccctggacctggaaaagtttcttgcctggcttacagaagctgaaacaactgccaatgtcctacaggatgctacccgtaaggaaaggctcctagaagactccaagggagtaaaagagctgatgaaacaatggcaagacctccaaggtgaaattgaagctcacacagatgtttatcacaacctggatgaaaacagccaaaaaatcctgagatccctggaaggttccgatgatgcagtcctgttacaaagacgtttggataacatgaacttcaagtggagtgaacttcggaaaaagtctctcaacattaggtcccatttggaagccagttctgaccagtggaagcgtctgggtccagcatctcagcactttctttccacgtctgtccagggtccctgggagagagccatctcgccaaacaaagtgccctactatatcaaccacgagactcaaacaacttgctgggaccatcccaaaatgacagagctctaccagtctttagctgacctgaataatgtcagattctcagcttataggactgccatgaaactccgaagactgcagaaggccctttgcttggatctcttgagcctgtcagctgcatgtgatgccttggaccagcacaacctcaagcaaaatgaccagcccatggatatcctgcagattattaattgtttgaccactatttatgaccgcctggagcaagagcacaacaatttggtcaacgtccctctctgcgtggatatgtgtctgaactggctgctgaatgtttatgatacgggacgaacagggaggatccgtgtcctgtcttttaaaactggcatcatttccctgtgtaaagcacatttggaagacaagtacagataccttttcaagcaagtggcaagttcaacaggattttgtgaccagcgcaggctgggcctccttctgcatgattctatccaaattccaagacagttgggtgaagttgcatcctttgggggcagtaacattgagccaagtgtccggagctgcttccaatttgctaataataagccagagatcgaagcggccctcttcctagactggatgagactggaaccccagtccatggtgtggctgcccgtcctgcacagagtggctgctgcagaaactgccaagcatcaggccaaatgtaacatctgcaaagagtgtccaatcattggattcaggtacaggagtctaaagcactttaattatgacatctgccaaagctgctttttttctggtcgagttgcaaaaggccataaaatgcactatcccatggtggaatattgcactccgactacatcaggagaagatgttcgagactttgccaaggtactaaaaaacaaatttcgaaccaaaaggtattttgcgaagcatccccgaatgggctacctgccagtgcagactgtcttagagggggacaacatggaaactcccgttactctgatcaacttctggccagtagattctgcgcctgcctcgtcccctcagctttcacacgatgatactcattcacgcattgaacattatgctagcaggctagcagaaatggaaaacagcaatggatcttatctaaatgatagcatctctcctaatgagagcatagatgatgaacatttgttaatccagcattactgccaaagtttgaaccaggactcccccctgagccagcctcgtagt

SEQ ID NO: 185 - DNA, 3960 bp, synthetic construct
  source 1..3960: mol_type = other DNA
atggccaagtacggcgagcacgaggccagccccgacaacggccagaacgagttcagcgacatcatcaagagccggagcgacgagcacaacgacgtgcagaagaagaccttcaccaagtggatcaacgcccggttcagcaagagcggcaagccccccatcaacgacatgttcaccgacctgaaggacggccggaagctgctggacctgctggagggcctgaccggcaccagcctgcccaaggagcggggcagcacccgggtgcacgccctgaacaacgtgaaccgggtgctgcaggtgctgcaccagaacaacgtggagctggtgaacatcggcggcaccgacatcgtggacggcaaccacaagctgaccctgggcctgctgtggagcatcatcctgcactggcaggtgaaggacgtgatgaaggacgtgatgagcgacctgcagcagaccaacagcgagaagatcctgctgagctgggtgcggcagaccacccggccctacagccaggtgaacgtgctgaacttcaccaccagctggaccgacggcctggccttcaacgccgtgctgcaccggcacaagcccgacctgttcagctgggacaaggtggtgaagatgagccccatcgagcggctggagcacgccttcagcaaggcccagacctacctgggcatcgagaagctgctggaccccgaggacgtggccgtgcagctgcccgacaagaagagcatcatcatgtacctgaccagcctgttcgaggtgctgccccagcaggtgaccatcgacgccatccgggaggtggagaccctgccccggaagtacaagaaggagtgcgaggaggaggccatcaacatccagagcaccgcccccgaggaggagcacgagagcccccgggccgagacccccagcaccgtgaccgaggtggacatggacctggacagctaccagatcgccctggaggaggtgctgacctggctgctgagcgccgaggacaccttccaggagcaggacgacatcagcgacgacgtggaggaggtgaaggaccagttcgccacccacgaggccttcatgatggagctgaccgcccaccagagcagcgtgggcagcgtgctgcaggccggcaaccagctgatcacccagggcaccctgagcgacgaggaggagttcgagatccaggagcagatgaccctgctgaacgcccggtgggaggccctgcgggtggagagcatggaccggcagagccggctgcacgacgtgctgatggagctgcagaagaagcagctgcagcagctgagcgcctggctgaccctgaccgaggagcggatccagaagatggagacctgccccctggacgacgacgtgaagagcctgcagaagctgctggaggagcacaagagcctgcagagcgacctggaggccgagcaggtgaaggtgaacagcctgacccacatggtggtgatcgtggacgagaacagcggcgagagcgccaccgccatcctggaggaccagctgcagaagctgggcgagcggtggaccgccgtgtgccggtggaccgaggagcggtggaaccggctgcaggagatcgccgctagcgcccggttcgaccggagcgtggagaagtggcggcggttccactacgacatcaagatcttcaaccagtggctgaccgaggccgagcagttcctgcggaagacccagatccccgagaactgggagcacgccaagtacaagtggtacctgaaggagctgcaggacggcatcggccagcggcagaccgtggtgcggaccctgaacgccaccggcgaggagatcatccagcagagcagcaagaccgacgccagcatcctgcaggagaagctgggcagcctgaacctgcggtggcaggaggtgtgcaagcagctgagcgaccggaagaagcggctggaggagcagaagaaggacagcacccagtggctggaggccaaggaggaggccgagcaggtgctgggccaggcccgggccaagctggagagctggaaggagggcccctacaccgtggacgccatccagaagaagatcaccgagaccaagcagctggccaaggacctgcggcagtggcagaccaacgtggacgtggccaacgacctggccctgaagctgctgcgggactacagcgccgacgacacccggaaggtgcacatgatcaccgagaacatcaacgccagctggcggagcatccacaagcgggtgagcgagcgggaggccgccctggaggagacccaccggctgctgcagcagttccccctggacctggagaagttcctggcctggctgaccgaggccgagaccaccgccaacgtgctgcaggacgccacccggaaggagcggctgctggaggacagcaagggcgtgaaggagctgatgaagcagtggcaggacctgcagggcgagatcgaggcccacaccgacgtgtaccacaacctggacgagaacagccagaagatcctgcggagcctggagggcagcgacgacgccgtgctgctgcagcggcggctggacaacatgaacttcaagtggagcgagctgcggaagaagagcctgaacatccggagccacctggaggccagcagcgaccagtggaagcggctgggccccgccagccagcacttcctgagcaccagcgtgcagggcccctgggagcgggccatcagccccaacaaggtgccctactacatcaaccacgagacccagaccacctgctgggaccaccccaagatgaccgagctgtaccagagcctggccgacctgaacaacgtgcggttcagcgcctaccggaccgccatgaagctgcggcggctgcagaaggccctgtgcctggacctgctgagcctgagcgccgcctgcgacgccctggaccagcacaacctgaagcagaacgaccagcccatggacatcctgcagatcatcaactgcctgaccaccatctacgaccggctggagcaggagcacaacaacctggtgaacgtgcccctgtgcgtggacatgtgcctgaactggctgctgaacgtgtacgacaccggccggaccggccggatccgggtgctgagcttcaagaccggcatcatcagcctgtgcaaggcccacctggaggacaagtaccggtacctgttcaagcaggtggccagcagcaccggcttctgcgaccagcggcggctgggcctgctgctgcacgacagcatccagatcccccggcagctgggcgaggtggccagcttcggcggcagcaacatcgagcccagcgtgcggagctgcttccagttcgccaacaacaagcccgagatcgaggccgccctgttcctggactggatgcggctggagccccagagcatggtgtggctgcccgtgctgcaccgggtggccgccgccgagaccgccaagcaccaggccaagtgcaacatctgcaaggagtgccccatcatcggcttccggtaccggagcctgaagcacttcaactacgacatctgccagagctgcttcttcagcggccgggtggccaagggccacaagatgcactaccccatggtggagtactgcacccccaccaccagcggcgaggacgtgcgggacttcgccaaggtgctgaagaacaagttccggaccaagcggtacttcgccaagcacccccggatgggctacctgcccgtgcagaccgtgctggagggcgacaacatggagacccccgtgaccctgatcaacttctggcccgtggacagcgcccccgccagcagcccccagctgagccacgacgacacccacagccggatcgagcactacgccagccggctggccgagatggagaacagcaacggcagctacctgaacgacagcatcagccccaacgagagcatcgacgacgagcacctgctgatccagcactactgccagagcctgaaccaggacagccccctgagccagccccggagc

SEQ ID NO: 186 - protein, 324 aa, synthetic construct
RSVEKWRRFHYDIKIFNQWLTEAEQFLRKTQIPENWEHAKYKWYLKELQDGIGQRQTVVRTLNATGEEIIQQSSKTDASILQEKLGSLNLRWQEVCKQLSDRKKRLEEQKNILSEFQRDLNEFVLWLEEADNIASIPLEPGKEQQLKEKLEQVKLLVEELPLRQGILKQLNETGGPVLVSAPISPEEQDKLENKLKQTNLQWIKVSRALPEKQGEIEAQIKDLGQLEKKLEDLEEQLNHLLLWLSPIRNQLEIYNQPNQEGPFDVKETEIAVQAKQPDVEEILSKGQHLYKEKPATQPVKRKLEDLSSEWKAVNRLLQELRAKQ

SEQ ID NO: 187 - protein, 123 aa, synthetic construct
ASSDQWKRLHLSLQELLVWLQLKDDELSRQAPIGGDFPAVQKQNDVHRAFKRELKTKEPVIMSTLETVRIFLTEQPLEGLEKLYQEPRELPPEERAQNVTRLLRKQAEEVNTEWEKLNLHSAD

SEQ ID NO: 188 - DNA, 972 bp, Homo sapiens
  source 1..972: mol_type = genomic DNA
agatctgttgagaaatggcggcgttttcattatgatataaagatatttaatcagtggctaacagaagctgaacagtttctcagaaagacacaaattcctgagaattgggaacatgctaaatacaaatggtatcttaaggaactccaggatggcattgggcagcggcaaactgttgtcagaacattgaatgcaactggggaagaaataattcagcaatcctcaaaaacagatgccagtattctacaggaaaaattgggaagcctgaatctgcggtggcaggaggtctgcaaacagctgtcagacagaaaaaagaggctagaagaacaaaagaatatcttgtcagaatttcaaagagatttaaatgaatttgttttatggttggaggaagcagataacattgctagtatcccacttgaacctggaaaagagcagcaactaaaagaaaagcttgagcaagtcaagttactggtggaagagttgcccctgcgccagggaattctcaaacaattaaatgaaactggaggacccgtgcttgtaagtgctcccataagcccagaagagcaagataaacttgaaaataagctcaagcagacaaatctccagtggataaaggtttccagagctttacctgagaaacaaggagaaattgaagctcaaataaaagaccttgggcagcttgaaaaaaagcttgaagaccttgaagagcagttaaatcatctgctgctgtggttatctcctattaggaatcagttggaaatttataaccaaccaaaccaagaaggaccatttgacgttaaggaaactgaaatagcagttcaagctaaacaaccggatgtggaagagattttgtctaaagggcagcatttgtacaaggaaaaaccagccactcagccagtgaagaggaagttagaagatctgagctctgagtggaaggcggtaaaccgtttacttcaagagctgagggcaaagcag

SEQ ID NO: 189 - DNA, 369 bp, Homo sapiens
  source 1..369: mol_type = genomic DNA
gccagttctgaccagtggaagcgtctgcacctttctctgcaggaacttctggtgtggctacagctgaaagatgatgaattaagccggcaggcacctattggaggcgactttccagcagttcagaagcagaacgatgtacatagggccttcaagagggaattgaaaactaaagaacctgtaatcatgagtactcttgagactgtacgaatatttctgacagagcagcctttggaaggactagagaaactctaccaggagcccagagagctgcctcctgaggagagagcccagaatgtcactcggcttctacgaaagcaggctgaggaggtcaatactgagtgggaaaaattgaacctgcactccgctgac

SEQ ID NO: 190 - DNA, 369 bp, synthetic construct
  source 1..369: mol_type = other DNA
gccagcagcgaccagtggaagcggctgcacctgagcctgcaggagctgctggtgtggctgcagctgaaggacgacgagctgagccggcaggcccccatcggcggcgacttccccgccgtgcagaagcagaacgacgtgcaccgggccttcaagcgggagctgaagaccaaggagcccgtgatcatgagcaccctggagaccgtgcggatcttcctgaccgagcagcccctggagggcctggagaagctgtaccaggagccccgggagctgccccccgaggagcgggcccagaacgtgacccggctgctgcggaagcaggccgaggaggtgaacaccgagtgggagaagctgaacctgcacagcgccgac

SEQ ID NO: 191 - protein, 310 aa, synthetic construct
MAKYGEHEASPDNGQNEFSDIIKSRSDEHNDVQKKTFTKWINARFSKSGKPPINDMFTDLKDGRKLLDLLEGLTGTSLPKERGSTRVHALNNVNRVLQVLHQNNVELVNIGGTDIVDGNHKLTLGLLWSIILHWQVKDVMKDVMSDLQQTNSEKILLSWVRQTTRPYSQVNVLNFTTSWTDGLAFNAVLHRHKPDLFSWDKVVKMSPIERLEHAFSKAQTYLGIEKLLDPEDVAVQLPDKKSIIMYLTSLFEVLPQQVTIDAIREVETLPRKYKKECEEEAINIQSTAPEEEHESPRAETPSTVTEVDMD

SEQ ID NO: 192 - protein, 110 aa, synthetic construct
LDSYQIALEEVLTWLLSAEDTFQEQDDISDDVEEVKDQFATHEAFMMELTAHQSSVGSVLQAGNQLITQGTLSDEEEFEIQEQMTLLNARWEALRVESMDRQSRLHDVLM

SEQ ID NO: 193 - protein, 107 aa, synthetic construct
ELQKKQLQQLSAWLTLTEERIQKMETCPLDDDVKSLQKLLEEHKSLQSDLEAEQVKVNSLTHMVVIVDENSGESATAILEDQLQKLGERWTAVCRWTEERWNRLQEI

SEQ ID NO: 194 - protein, 111 aa, synthetic construct
NILWQELLEEQCLLKAWLTEKEEALNKVQTSNFKDQKELSVSVRRLAILKEDMEMKRQTLDQLSEIGQDVGQLLDNSKASKKINSDSEELTQRWDSLVQRLEDSSNQVTQA

SEQ ID NO: 195 - protein, 32 aa, synthetic construct
VAKLGMSQIPQKDLLETVRVREQAITKKSKQE

SEQ ID NO: 196 - protein, 4 aa, synthetic construct
AASA

SEQ ID NO: 197 - protein, 116 aa, synthetic construct [sequence omitted]

SEQ ID NO: 198 - protein, 110 aa, synthetic construct
RSVEKWRRFHYDIKIFNQWLTEAEQFLRKTQIPENWEHAKYKWYLKELQDGIGQRQTVVRTLNATGEEIIQQSSKTDASILQEKLGSLNLRWQEVCKQLSDRKKRLEEQK

SEQ ID NO: 199 - protein, 214 aa, synthetic construct
NILSEFQRDLNEFVLWLEEADNIASIPLEPGKEQQLKEKLEQVKLLVEELPLRQGILKQLNETGGPVLVSAPISPEEQDKLENKLKQTNLQWIKVSRALPEKQGEIEAQIKDLGQLEKKLEDLEEQLNHLLLWLSPIRNQLEIYNQPNQEGPFDVKETEIAVQAKQPDVEEILSKGQHLYKEKPATQPVKRKLEDLSSEWKAVNRLLQELRAKQ

SEQ ID NO: 200 - protein, 122 aa, synthetic construct
SSDQWKRLHLSLQELLVWLQLKDDELSRQAPIGGDFPAVQKQNDVHRAFKRELKTKEPVIMSTLETVRIFLTEQPLEGLEKLYQEPRELPPEERAQNVTRLLRKQAEEVNTEWEKLNLHSAD

SEQ ID NO: 201 - protein, 120 aa, synthetic construct
QRKIDETLERLQELQEATDELDLKLRQAEVIKGSWQPVGDLLIDSLQDHLEKVKALRGEIAPLKENVSHVNDLARQLTTLGIQLSPYNLSTLEDLNTRWKLLQVAVEDRVRQLHEAHRDF

SEQ ID NO: 202 - protein, 364 aa, synthetic construct; identical to SEQ ID NO: 49

SEQ ID NO: 203 - protein, 325 aa, synthetic construct; identical to SEQ ID NO: 40

SEQ ID NO: 204 - protein, 47 aa, synthetic construct
QPDLAPGLTTIGASPTQTVTLVTQPVVTKETAISKLEMPSSLMLEVP

SEQ ID NO: 205 - protein, 105 aa, synthetic construct
KDSTQWLEAKEEAEQVLGQARAKLESWKEGPYTVDAIQKKITETKQLAKDLRQWQTNVDVANDLALKLLRDYSADDTRKVHMITENINASWRSIHKRVSEREAAL

SEQ ID NO: 206 - protein, 126 aa, synthetic construct
EETHRLLQQFPLDLEKFLAWLTEAETTANVLQDATRKERLLEDSKGVKELMKQWQDLQGEIEAHTDVYHNLDENSQKILRSLEGSDDAVLLQRRLDNMNFKWSELRKKSLNIRSHLEASSDQWKRL

SEQ ID NO: 207 - DNA, 930 bp, Homo sapiens
  source 1..930: mol_type = genomic DNA
atggccaagtatggagaacatgaagccagtcctgacaatgggcagaacgaattcagtgatatcattaagtccagatctgatgaacacaatgacgtacagaagaaaacctttaccaaatggataaatgctcgattttcaaagagtgggaaaccacccatcaatgatatgttcacagacctcaaagatggaaggaagctattggatcttctagaaggcctcacaggaacatcactgccaaaggaacgtggttccacaagggtacatgccttaaataacgtcaacagagtgctgcaggttttacatcagaacaatgtggaattagtgaatatagggggaactgacattgtggatggaaatcacaaactgactttggggttactttggagcatcattttgcactggcaggtgaaagatgtcatgaaggatgtcatgtcggacctgcagcagacgaacagtgagaagatcctgctcagctgggtgcgtcagaccaccaggccctacagccaagtcaacgtcctcaacttcaccaccagctggacagatggactcgcctttaatgctgtcctccaccgacataaacctgatctcttcagctgggataaagttgtcaaaatgtcaccaattgagagacttgaacatgccttcagcaaggctcaaacttatttgggaattgaaaagctgttagatcctgaagatgttgccgttcagcttcctgacaagaaatccataattatgtatttaacatctttgtttgaggtgctacctcagcaagtcaccatagacgccatccgtgaggtagagacactcccaaggaaatataaaaaagaatgtgaagaagaggcaattaatatacagagtacagcgcctgaggaggagcatgagagtccccgagctgaaactcccagcactgtcactgaggttgacatggat

SEQ ID NO: 208 - DNA, 930 bp, synthetic construct
  source 1..930: mol_type = other DNA
atggccaagtacggcgagcacgaggccagccccgacaacggccagaacgagttcagcgacatcatcaagagccggagcgacgagcacaacgacgtgcagaagaagaccttcaccaagtggatcaacgcccggttcagcaagagcggcaagccccccatcaacgacatgttcaccgacctgaaggacggccggaagctgctggacctgctggagggcctgaccggcaccagcctgcccaaggagcggggcagcacccgggtgcacgccctgaacaacgtgaaccgggtgctgcaggtgctgcaccagaacaacgtggagctggtgaacatcggcggcaccgacatcgtggacggcaaccacaagctgaccctgggcctgctgtggagcatcatcctgcactggcaggtgaaggacgtgatgaaggacgtgatgagcgacctgcagcagaccaacagcgagaagatcctgctgagctgggtgcggcagaccacccggccctacagccaggtgaacgtgctgaacttcaccaccagctggaccgacggcctggccttcaacgccgtgctgcaccggcacaagcccgacctgttcagctgggacaaggtggtgaagatgagccccatcgagcggctggagcacgccttcagcaaggcccagacctacctgggcatcgagaagctgctggaccccgaggacgtggccgtgcagctgcccgacaagaagagcatcatcatgtacctgaccagcctgttcgaggtgctgccccagcaggtgaccatcgacgccatccgggaggtggagaccctgccccggaagtacaagaaggagtgcgaggaggaggccatcaacatccagagcaccgcccccgaggaggagcacgagagcccccgggccgagacccccagcaccgtgaccgaggtggacatggac

SEQ ID NO: 209 - DNA, 330 bp, Homo sapiens
  source 1..330: mol_type = genomic DNA
ctggacagctatcagattgcgttggaggaagtgctgacctggttgctttctgctgaggacactttccaggagcaggatgatatttctgatgatgttgaagaagtcaaagaccagtttgcaacccatgaagcttttatgatggaactgactgcacaccagagcagtgtgggcagcgtcctgcaggcaggcaaccaactgataacacaaggaactctgtcagacgaagaagaatttgagattcaggaacagatgaccctgctgaatgctagatgggaggctcttagggtggagagtatggacagacagtcccggctgcacgatgtgctgatg

SEQ ID NO: 210 - DNA, 330 bp, synthetic construct
  source 1..330: mol_type = other DNA
ctggacagctaccagatcgccctggaggaggtgctgacctggctgctgagcgccgaggacaccttccaggagcaggacgacatcagcgacgacgtggaggaggtgaaggaccagttcgccacccacgaggccttcatgatggagctgaccgcccaccagagcagcgtgggcagcgtgctgcaggccggcaaccagctgatcacccagggcaccctgagcgacgaggaggagttcgagatccaggagcagatgaccctgctgaacgcccggtgggaggccctgcgggtggagagcatggaccggcagagccggctgcacgacgtgctgatg

SEQ ID NO: 211 - DNA, 321 bp, Homo sapiens
  source 1..321: mol_type = genomic DNA
gaactgcagaagaagcaactgcagcagctctccgcctggttaacactcacagaggagcgcattcagaagatggaaacttgccccctggatgatgatgtaaaatctctacaaaagctgctagaagaacataaaagtttgcaaagtgatcttgaggctgaacaggtgaaagtaaattcactaactcacatggtggtcattgttgatgaaaacagtggtgagagtgctacagctatcctagaagaccagttacagaaacttggtgagcgctggacagcagtatgccgttggactgaagaacgctggaataggttacaagaaatc

SEQ ID NO: 212 - DNA, 321 bp, synthetic construct
  source 1..321: mol_type = other DNA
gagctgcagaagaagcagctgcagcagctgagcgcctggctgaccctgaccgaggagcggatccagaagatggagacctgccccctggacgacgacgtgaagagcctgcagaagctgctggaggagcacaagagcctgcagagcgacctggaggccgagcaggtgaaggtgaacagcctgacccacatggtggtgatcgtggacgagaacagcggcgagagcgccaccgccatcctggaggaccagctgcagaagctgggcgagcggtggaccgccgtgtgccggtggaccgaggagcggtggaaccggctgcaggagatc

SEQ ID NO: 213 - DNA, 333 bp, Homo sapiens
  source 1..333: mol_type = genomic DNA
aatatattgtggcaggaattattggaagaacagtgcttgttgaaagcttggttaaccgaaaaagaagaggctttaaataaagtccagacaagcaacttcaaagaccaaaaggaactaagtgtcagtgttcgacgtctggctattttgaaggaagacatggaaatgaagcgtcaaacattggatcagctgagtgagattggccaggatgtgggacaattacttgataattccaaggcatctaagaagatcaacagtgactcagaggaactgactcaaagatgggattctttggttcagagactagaagattcctccaaccaggtgactcaggct

SEQ ID NO: 214 - DNA, 333 bp, synthetic construct
  source 1..333: mol_type = other DNA
aacatcctgtggcaggagctgctggaggagcagtgcctgctgaaggcctggctgaccgagaaggaggaggccctgaacaaggtgcagaccagcaacttcaaggaccagaaggagctgagcgtgagcgtgcggcggctggccatcctgaaggaggacatggagatgaagcggcagaccctggaccagctgagcgagatcggccaggacgtgggccagctgctggacaacagcaaggccagcaagaagatcaacagcgacagcgaggagctgacccagcggtgggacagcctggtgcagcggctggaggacagcagcaaccaggtgacccaggcc

SEQ ID NO: 215 - DNA, 96 bp, Homo sapiens
  source 1..96: mol_type = genomic DNA
gtagcaaagctggggatgtctcagattcctcagaaggaccttttggagactgttcgtgtaagagaacaagcaattacaaaaaaatctaagcaggaa

SEQ ID NO: 216 - DNA, 96 bp, synthetic construct
  source 1..96: mol_type = other DNA
gtggccaagctgggcatgagccagatcccccagaaggacctgctggagaccgtgcgggtgcgggagcaggccatcaccaagaagagcaagcaggag

SEQ ID NO: 217 - DNA, 12 bp, synthetic construct
  source 1..12: mol_type = other DNA
gccgctagcgcc

SEQ ID NO: 218 - DNA, 348 bp, Homo sapiens
  source 1..348: mol_type = genomic DNA
atgatggtgatgactgaagacatgcctttggaaatttcttatgtgccttctacttatttgactgaaatcactcatgtctcacaagccctattagaagtggaacaacttctcaatgctcctgacctctgtgctaaggactttgaagatctctttaagcaagaggagtctctgaagaatataaaagatagtctacaacaaagctcaggtcggattgacattattcatagcaagaagacagcagcattgcaaagtgcaacgcctgtggaaagggtgaagctacaggaagctctctcccagcttgatttccaatgggaaaaagttaacaaaatgtacaaggaccgacaaggg

SEQ ID NO: 219 - DNA, 348 bp, synthetic construct
  source 1..348: mol_type = other DNA
atgatggtgatgaccgaggacatgcccctggagatcagctacgtgcccagcacctacctgaccgagatcacccacgtgagccaggccctgctggaggtggagcagctgctgaacgcccccgacctgtgcgccaaggacttcgaggacctgttcaagcaggaggagagcctgaagaacatcaaggacagcctgcagcagagcagcggccggatcgacatcatccacagcaagaagaccgccgccctgcagagcgccacccccgtggagcgggtgaagctgcaggaggccctgagccagctggacttccagtgggagaaggtgaacaagatgtacaaggaccggcagggc

SEQ ID NO: 220 - DNA, 339 bp, Homo sapiens; identical to SEQ ID NO: 61
  source 1..339: mol_type = genomic DNA

SEQ ID NO: 221 - DNA, 339 bp, synthetic construct; identical to SEQ ID NO: 62
  source 1..339: mol_type = other DNA

SEQ ID NO: 222 - DNA, 972 bp, Homo sapiens; identical to SEQ ID NO: 188
  source 1..972: mol_type = genomic DNA

SEQ ID NO: 223 - DNA, 972 bp, synthetic construct
  source 1..972: mol_type = other DNA
cggagcgtggagaagtggcggcggttccactacgacatcaagatcttcaaccagtggctgaccgaggccgagcagttcctgcggaagacccagatccccgagaactgggagcacgccaagtacaagtggtacctgaaggagctgcaggacggcatcggccagcggcagaccgtggtgcggaccctgaacgccaccggcgaggagatcatccagcagagcagcaagaccgacgccagcatcctgcaggagaagctgggcagcctgaacctgcggtggcaggaggtgtgcaagcagctgagcgaccggaagaagcggctggaggagcagaagaacatcctgagcgagttccagcgggacctgaacgagttcgtgctgtggctggaggaggccgacaacatcgccagcatccccctggagcccggcaaggagcagcagctgaaggagaagctggagcaggtgaagctgctggtggaggagctgcccctgcggcagggcatcctgaagcagctgaacgagaccggcggccccgtgctggtgagcgcccccatcagccccgaggagcaggacaagctggagaacaagctgaagcagaccaacctgcagtggatcaaggtgagccgggccctgcccgagaagcagggcgagatcgaggcccagatcaaggacctgggccagctggagaagaagctggaggacctggaggagcagctgaaccacctgctgctgtggctgagccccatccggaaccagctggagatctacaaccagcccaaccaggagggccccttcgacgtgaaggagaccgagatcgccgtgcaggccaagcagcccgacgtggaggagatcctgagcaagggccagcacctgtacaaggagaagcccgccacccagcccgtgaagcggaagctggaggacctgagcagcgagtggaaggccgtgaaccggctgctgcaggagctgcgggccaagcag

SEQ ID NO: 224 - DNA, 366 bp, Homo sapiens
  source 1..366: mol_type = genomic DNA
agttctgaccagtggaagcgtctgcacctttctctgcaggaacttctggtgtggctacagctgaaagatgatgaattaagccggcaggcacctattggaggcgactttccagcagttcagaagcagaacgatgtacatagggccttcaagagggaattgaaaactaaagaacctgtaatcatgagtactcttgagactgtacgaatatttctgacagagcagcctttggaaggactagagaaactctaccaggagcccagagagctgcctcctgaggagagagcccagaatgtcactcggcttctacgaaagcaggctgaggaggtcaatactgagtgggaaaaattgaacctgcactccgctgac

SEQ ID NO: 225 - DNA, 366 bp, synthetic construct
  source 1..366: mol_type = other DNA
agcagcgaccagtggaagcggctgcacctgagcctgcaggagctgctggtgtggctgcagctgaaggacgacgagctgagccggcaggcccccatcggcggcgacttccccgccgtgcagaagcagaacgacgtgcaccgggccttcaagcgggagctgaagaccaaggagcccgtgatcatgagcaccctggagaccgtgcggatcttcctgaccgagcagcccctggagggcctggagaagctgtaccaggagccccgggagctgccccccgaggagcgggcccagaacgtgacccggctgctgcggaagcaggccgaggaggtgaacaccgagtgggagaagctgaacctgcacagcgccgac

SEQ ID NO: 226 - DNA, 363 bp, Homo sapiens; identical to SEQ ID NO: 66
  source 1..363: mol_type = genomic DNA

SEQ ID NO: 227 - DNA, 363 bp, synthetic construct; identical to SEQ ID NO: 66
  source 1..363: mol_type = other DNA

SEQ ID NO: 228 - DNA, 360 bp, Homo sapiens
  source 1..360: mol_type = genomic DNA
cagagaaaaatagatgagacccttgaaagactccgggaacttcaagaggccacggatgagctggacctcaagctgcgccaagctgaggtgatcaagggatcctggcagcccgtgggcgatctcctcattgactctctccaagatcacctcgagaaagtcaaggcacttcgaggagaaattgcgcctctgaaagagaacgtgagccacgtcaatgaccttgctcgccagcttaccactttgggcattcagctctcaccgtataacctcagcactctggaagacctgaacaccagatggaagcttctgcaggtggccgtcgaggaccgagtcaggcagctgcatgaagcccacagggacttt

SEQ ID NO: 229 - DNA, 360 bp, synthetic construct; identical to SEQ ID NO: 228
  source 1..360: mol_type = other DNA

SEQ ID NO: 230 - DNA, 1092 bp, Homo sapiens; identical to SEQ ID NO: 68
  source 1..1092: mol_type = genomic DNA

SEQ ID NO: 231 - DNA, 1092 bp, synthetic construct; identical to SEQ ID NO: 68
  source 1..1092: mol_type = other DNA

SEQ ID NO: 232 - DNA, 396 bp, Homo sapiens; identical to SEQ ID NO: 74
  source 1..396: mol_type = genomic DNA

SEQ ID NO: 233 - DNA, 396 bp, synthetic construct; identical to SEQ ID NO: 74
  source 1..396: mol_type = other DNA

SEQ ID NO: 234 - DNA, 975 bp, Homo sapiens; identical to SEQ ID NO: 53
  source 1..975: mol_type = genomic DNA

SEQ ID NO: 235 - DNA, 975 bp, synthetic construct; identical to SEQ ID NO: 54
  source 1..975: mol_type = other DNA

SEQ ID NO: 236 - DNA, 378 bp, Homo sapiens; identical to SEQ ID NO: 55
  source 1..378: mol_type = genomic DNA

SEQ ID NO: 237 - DNA, 378 bp, synthetic construct; identical to SEQ ID NO: 56
  source 1..378: mol_type = other DNA

SEQ ID NO: 238 - DNA, 315 bp, Homo sapiens; identical to SEQ ID NO: 57
  source 1..315: mol_type = genomic DNA

SEQ ID NO: 239 - DNA, 315 bp, synthetic construct; identical to SEQ ID NO: 58
  source 1..315: mol_type = other DNA

SEQ ID NO: 240 - DNA, 339 bp, Homo sapiens; identical to SEQ ID NO: 61
  source 1..339: mol_type = genomic DNA

SEQ ID NO: 241 - DNA, 339 bp, synthetic construct; identical to SEQ ID NO: 62
  source 1..339: mol_type = other DNA

SEQ ID NO: 242 - DNA, 141 bp, Homo sapiens
  source 1..141: mol_type = genomic DNA
cagcctgacctagctcctggactgaccactattggagcctctcctactcagactgttactctggtgacacaacctgtggttactaaggaaactgccatctccaaactagaaatgccatcttccttgatgttggaggtacct

SEQ ID NO: 243 - DNA, 141 bp, synthetic construct
  source 1..141: mol_type = other DNA
cagcccgacctggcccccggcctgaccaccatcggcgccagccccacccagaccgtgaccctggtgacccagcccgtggtgaccaaggagaccgccatcagcaagctggagatgcccagcagcctgatgctggaggtgccc

SEQ ID NO: 244 - DNA, 315 bp, Homo sapiens
  source 1..315: mol_type = genomic DNA
aaggattcaacacaatggctggaagctaaggaagaagctgagcaggtcttaggacaggccagagccaagcttgagtcatggaaggagggtccctatacagtagatgcaatccaaaagaaaatcacagaaaccaagcagttggccaaagacctccgccagtggcagacaaatgtagatgtggcaaatgacttggccctgaaacttctccgggattattctgcagatgataccagaaaagtccacatgataacagagaatatcaatgcctcttggagaagcattcataaaagggtgagtgagcgagaggctgctttg

SEQ ID NO: 245 - DNA, 315 bp, synthetic construct
  source 1..315: mol_type = other DNA
aaggacagcacccagtggctggaggccaaggaggaggccgagcaggtgctgggccaggcccgggccaagctggagagctggaaggagggcccctacaccgtggacgccatccagaagaagatcaccgagaccaagcagctggccaaggacctgcggcagtggcagaccaacgtggacgtggccaacgacctggccctgaagctgctgcgggactacagcgccgacgacacccggaaggtgcacatgatcaccgagaacatcaacgccagctggcggagcatccacaagcgggtgagcgagcgggaggccgccctg

SEQ ID NO: 246 - DNA, 378 bp, Homo sapiens
  source 1..378: mol_type = genomic DNA
gaagaaactcatagattactgcaacagttccccctggacctggaaaagtttcttgcctggcttacagaagctgaaacaactgccaatgtcctacaggatgctacccgtaaggaaaggctcctagaagactccaagggagtaaaagagctgatgaaacaatggcaagacctccaaggtgaaattgaagctcacacagatgtttatcacaacctggatgaaaacagccaaaaaatcctgagatccctggaaggttccgatgatgcagtcctgttacaaagacgtttggataacatgaacttcaagtggagtgaacttcggaaaaagtctctcaacattaggtcccatttggaagccagttctgaccagtggaagcgtctg

SEQ ID NO: 247 - DNA, 378 bp, synthetic construct
  source 1..378: mol_type = other DNA
gaggagacccaccggctgctgcagcagttccccctggacctggagaagttcctggcctggctgaccgaggccgagaccaccgccaacgtgctgcaggacgccacccggaaggagcggctgctggaggacagcaagggcgtgaaggagctgatgaagcagtggcaggacctgcagggcgagatcgaggcccacaccgacgtgtaccacaacctggacgagaacagccagaagatcctgcggagcctggagggcagcgacgacgccgtgctgctgcagcggcggctggacaacatgaacttcaagtggagcgagctgcggaagaagagcctgaacatccggagccacctggaggccagcagcgaccagtggaagcggctg

SEQ ID NO: 248 - protein, 22 aa, synthetic construct
MAKYGEHEASPDNGQNEFSDII

SEQ ID NO: 249 - protein, 27 aa, synthetic construct
MSGLAATTFHWKKCRLDLPGHVALQAC

What is claimed is:

1. A recombinant nucleic acid comprising a nucleotide sequence encoding a micro-dystrophin protein comprising a utrophin N-terminus.

2. The recombinant nucleic acid of claim 1, wherein the micro-dystrophin protein comprises the region of utrophin from the N-terminus to spectrin-like repeat 1.

3. The recombinant nucleic acid of claim 1, wherein the micro-dystrophin protein comprises the region of utrophin from the N-terminus to spectrin-like repeat 2.

4. The recombinant nucleic acid of claim 1, wherein the micro-dystrophin protein comprises the region of utrophin from the N-terminus to spectrin-like repeat 3.

5. The recombinant nucleic acid of claim 1, wherein the micro-dystrophin protein comprises the region of utrophin from the N-terminus to hinge 2.

6. The recombinant nucleic acid of any one of claims 1-5, wherein the nucleic acid comprises a nucleotide sequence that is at least 80%, 85%, 90%, 95%, 98%, or 99% identical to any one of SEQ ID NOs: 7-12 and 22-39.

7. The recombinant nucleic acid of any one of claims 1-6, wherein the nucleic acid comprises the nucleotide sequence of any one of SEQ ID NOs: 7-12 and 22-39.

8. The recombinant nucleic acid of any one of claims 1-5, wherein the nucleic acid comprises a nucleotide sequence that is at least 80%, 85%, 90%, 95%, 98%, or 99% identical to any one of SEQ ID NOs: 85-92, 126-131, 133 and 134.

9. The recombinant nucleic acid of any one of claims 1-5 and 8, wherein the nucleic acid comprises the nucleotide sequence of any one of SEQ ID NOs: 85-92, 126-131, 133 and 134.

10. The recombinant nucleic acid of any one of claims 1-5, wherein the nucleic acid comprises a nucleotide sequence that is at least 80%, 85%, 90%, 95%, 98%, or 99% identical to any one of SEQ ID NOs: 135-148.

11. The recombinant nucleic acid of any one of claims 1-5 and 10, wherein the nucleic acid comprises the nucleotide sequence of any one of SEQ ID NOs: 135-148.

12. The recombinant nucleic acid of any one of claims 1-5, wherein the nucleic acid comprises a nucleotide sequence that is at least 80%, 85%, 90%, 95%, 98%, or 99% identical to any one of SEQ ID NOs: 166-185.

13. The recombinant nucleic acid of any one of claims 1-5 and 12, wherein the nucleic acid comprises the nucleotide sequence of any one of SEQ ID NOs: 166-185.

14. The recombinant nucleic acid of any preceding claim, wherein the nucleic acid comprises one or more nucleotide sequences of any one of SEQ ID NOs: 70, 72, and 207-247.

15. The recombinant nucleic acid of any preceding claim, wherein the nucleic acid comprises at least two, at least three, at least four, or at least five nucleotide sequences of any one of SEQ ID NOs: 70, 72, and 207-247.

16. The recombinant nucleic acid of any preceding claim comprising a promoter that is operably linked to the nucleotide sequence encoding the micro-dystrophin protein.

17. The recombinant nucleic acid of claim 16, wherein the promoter is a cardiac-specific promoter.

18. The recombinant nucleic acid of claim 17, wherein the cardiac-specific promoter is a cardiac troponin T (cTnT) promoter.

19. The recombinant nucleic acid of claim 16, wherein the promoter is a skeletal muscle-specific promoter.

20. The recombinant nucleic acid of claim 19, wherein the skeletal muscle-specific promoter is a skeletal muscle alpha-actin promoter.

21. The recombinant nucleic acid of claim 19 or 20, wherein the skeletal muscle-specific promoter comprises a nucleotide sequence that is at least 80% identical to SEQ ID NO: 78 or SEQ ID NO: 80.

22. The recombinant nucleic acid of any one of claims 19-21, wherein the skeletal muscle-specific promoter comprises the nucleotide sequence of SEQ ID NO: 78 or SEQ ID NO: 80.

23. The recombinant nucleic acid of any preceding claim, wherein the micro-dystrophin protein encoded by the nucleic acid comprises an amino acid sequence that is at least 80% identical to the amino acid sequence of any one of SEQ ID NOs: 1-6 and 13-21.

24. The recombinant nucleic acid of any preceding claim, wherein the micro-dystrophin protein encoded by the nucleic acid comprises the amino acid sequence of any one of SEQ ID NOs: 1-6 and 13-21.

25. A chimeric protein encoded by the recombinant nucleic acid of any one of claims 1-24.

26. A recombinant adeno-associated virus (rAAV) vector comprising the recombinant nucleic acid of any one of claims 1-24.

27. An rAAV particle comprising the rAAV vector of claim 26 encapsidated in an AAV capsid.

28. The rAAV particle of claim 27, wherein the AAV capsid comprises a capsid protein derived from AAV1, AAV2, AAV3, AAV6, AAV7, AAV8, AAVrh.74, AAVrh.10, AAV2/6 or AAV9 serotypes.

29. A composition comprising the rAAV particle of claim 27 or 28, or the rAAV vector of claim 26.

30. A method of treating a skeletal muscle disorder in a subject in need thereof, comprising administering to the subject the recombinant nucleic acid of any one of claims 1-24, the micro-dystrophin protein of claim 25, the rAAV particle of claim 27 or 28, or the composition of claim 29.

31. A method of treating Duchenne muscular dystrophy (DMD) in a subject in need thereof, comprising administering to the subject the recombinant nucleic acid of any one of claims 1-24, the micro-dystrophin protein of claim 25, the rAAV particle of claim 27 or 28, or the composition of claim 29.

32. A method of treating Duchenne muscular dystrophy (DMD) in a subject in need thereof, the method comprising delivering to the subject a first rAAV particle in accordance with claim 27 or 28 and a second rAAV particle in accordance with claim 27 or 28 to skeletal muscle.

33. The method of claim 32, wherein the rAAV vector of the first rAAV particle comprises a recombinant nucleic acid comprising a cardiac-specific promoter.

34. The method of claim 32, wherein the rAAV vector of the second rAAV particle comprises a recombinant nucleic acid comprising a skeletal-specific promoter.

35. The method of any one of claims 32-34, wherein the first rAAV particle comprises a capsid protein derived from AAV9, AAVrh.74, or AAVrh.10.

36. The method of any one of claims 32-34, wherein the second rAAV particle comprises a capsid protein derived from AAV8.

37. The method of any one of claims 32-36, wherein the first and second rAAV particles are delivered by the same route of administration.

38. The method of any one of claims 32-36, wherein the first and second rAAV particles are delivered by different routes of administration.

39. The method of any one of claims 32-37, wherein the first and second rAAV particles are delivered via one or more catheters.

40. The method of any one of claims 32-36 and 38, wherein the first and second rAAV particles are delivered via two or more catheters.

41. The method of claim 40 comprising:
(i) introducing a catheter into the femoral artery and advancing to the heart;
(ii) delivering the first rAAV particle into the left and right coronary arteries;
(iii) retracting the catheter to the aortic arch; and
(iv) delivering the second rAAV particle to the subclavian and/or carotid arteries.

42. The method of claim 41 further comprising (v) retracting the catheter into the descending aorta and delivering the second rAAV particle to skeletal muscle via descending aortic branches.

43. The method of any one of claims 32-42 further comprising administering a vasodilator to the subject prior to the delivery of the first and second rAAV particles.

44. The method of claim 43, wherein the vasodilator is a PDE5 inhibitor.

45. The method of claim 44, wherein the PDE5 inhibitor is sildenafil or tadalafil.

46. The method of any one of claims 43-45, wherein the vasodilator is administered 10 minutes, 20 minutes, 30 minutes, 40 minutes, 50 minutes, or 1 hour prior to the delivery of first rAAV particle and/or second rAAV particle.

47. The method of any one of claims 32-46, wherein a blood pressure cuff is inflated on each limb at the time of delivery of the first rAAV particle and/or the second rAAV particle.

48. The method of any one of claims 32-47, wherein the micro-dystrophin protein encoded by the vector of the first rAAV particle comprises: an amino-terminal actin-binding domain, hinge domain 1, spectrin-like repeat 1, spectrin-like repeat 17, spectrin-like repeat 18, and spectrin-like repeat 19, and wherein the micro-dystrophin protein does not contain spectrin-like repeat 2 and/or spectrin-like repeat 3 of dystrophin.

49. The method of claim 48, wherein the micro-dystrophin protein further comprises one or more of: spectrin-like repeat 24, hinge domain 4, and dystroglycan binding site of dystrophin.

50. The method of claim 48 or 49, wherein the micro-dystrophin protein further comprises one or more syntrophin binding domains of dystrophin.

51. The method of any one of claims 48-50, wherein the micro-dystrophin protein further comprises one or more coiled coil domains of dystrophin.

52. The method of any one of claims 48-51, wherein the spectrin-like repeat 1 of the micro-dystrophin protein is directly coupled to the spectrin-like repeat 17.

53. The method of any one of claims 48-52, wherein the spectrin-like repeat 19 of the micro-dystrophin protein is directly coupled to spectrin-like repeat 24.

54. The method of any one of claims 48-53, wherein the spectrin-like repeat 19 of the micro-dystrophin protein is directly coupled to hinge domain 4.

55. The method of any one of claims 32-54, wherein the micro-dystrophin protein encoded by the vector of the second rAAV particle comprises: an amino-terminal actin-binding domain, hinge domain 1, spectrin-like repeat 1, spectrin-like repeat 2, spectrin-like repeat 16, and spectrin-like repeat 17, and wherein the micro-dystrophin protein does not contain spectrin-like repeat 3 of dystrophin.

56. The method of claim 55, wherein the micro-dystrophin protein further comprises one or more of: spectrin-like repeat 23, spectrin-like repeat 24, hinge domain 4, and dystroglycan binding site of dystrophin.

57. The method of claim 55 or 56, wherein the micro-dystrophin protein further comprises one or more syntrophin binding domains of dystrophin.

58. The method of any one of claims 55-57, wherein the micro-dystrophin protein further comprises one or more coiled coil domains of dystrophin.

59. The method of any one of claims 55-58, wherein the spectrin-like repeat 2 of the micro-dystrophin protein is directly coupled to spectrin-like repeat 16.

60. The method of any one of claims 55-59, wherein the spectrin-like repeat 17 of the micro-dystrophin protein is directly coupled to spectrin-like repeat 24.

61. The method of any one of claims 55-60, wherein the spectrin-like repeat 17 of the micro-dystrophin protein is directly coupled to hinge domain 4.

62. The method of any one of 32-61, wherein the micro-dystrophin protein encoded by the vector of the first or second rAAV particle comprises the region of dystrophin from spectrin-like repeat 24 to the C-terminus.

63. The method of any one of claims 32-61, wherein the micro-dystrophin protein encoded by the vector of the first or second rAAV particle comprises the region of dystrophin from spectrin-like repeat 24 to the end of the proline rich region following the first coiled coil domain.

64. The method of any one of claims 32-61, wherein the micro-dystrophin protein encoded by the vector of the first or second rAAV particle comprises the region of dystrophin from hinge domain 4 to the C-terminus.

65. The method of any one of claims 32-61, wherein the micro-dystrophin protein encoded by the vector of the first or second rAAV particle comprises the region of dystrophin from hinge domain 4 to the end of the proline rich region following the first coiled coil domain.

66. The method of any one of claims 32-61, wherein the micro-dystrophin protein encoded by the vector of the first or second rAAV particle comprises the region of dystrophin from hinge domain 4 to the end of the second syntrophin binding domain.

67. A method of delivering the rAAV particle of claim 27 or 28 to a skeletal muscle in a subject, the method comprising delivering the rAAV particle via a catheter.

68. The method of claim 67 comprising delivering the rAAV particle via a catheter to the subclavian and/or carotid arteries.

69. The method of claim 67 or 68, wherein the catheter is first introduced into the femoral artery and advanced to the subclavian and/or carotid arteries.

70. The method of any one of claims 67-69, further comprising retracting the catheter into the descending aorta and delivering the rAAV particle to skeletal muscle via descending aortic branches.

71. The method of any one of claims 67-70, comprising administering a vasodilator.

72. The method of 71, wherein the vasodilator is a PDE5 inhibitor.

73. The method of claim 72, wherein the PDE5 inhibitor is sildenafil or tadalafil.

74. The method of any one of claims 71-73, wherein the vasodilator is administered 10 minutes, 20 minutes, 30 minutes, 40 minutes, 50 minutes, or 1 hour prior to the delivery of the rAAV particle.

75. The method of any one of claims 67-74 further comprising inflating a blood pressure cuff on each limb at the time of delivery of the rAAV particle.

76. The method of any one of claims 67-75, wherein the skeletal muscle is fast-twitch or slow-twitch.

77. A chimeric protein comprising an amino acid sequence having at least 90%, 95%, 98%, or 99% sequence identity to of any one of SEQ ID NOs: 81-84, 93-101 and 149-155.

78. A chimeric protein comprising the amino acid sequence of any one of SEQ ID NOs: 81-84, 93-101 and 149-155.

79. The chimeric protein of claim 77 or 78, wherein the protein comprises the amino acid sequence of any one of SEQ ID NOs: 96-101.

80. The chimeric protein of any one of claims 77-79, wherein the protein comprises the amino acid sequence of SEQ ID NO: 98 or 101.

81. A recombinant nucleic acid encoding the chimeric protein of any one of claims 77-80.

82. The recombinant nucleic acid of claim 81, wherein the nucleic acid comprises the nucleotide sequence of any one of SEQ ID NOs: 85-92.

83. A recombinant nucleic acid comprising a nucleotide sequence encoding a micro-dystrophin protein comprising a utrophin N-terminus, wherein the nucleic acid comprises a sequence having at least 85%, 90%, 95%, 98%, or 99% sequence identity to of any one of SEQ ID NOs 85-92.

84. An rAAV vector comprising the recombinant nucleic acid of any one of claims 81-83.

85. An rAAV particle comprising the rAAV vector of claim 84.

86. A cell comprising the chimeric protein of any one of claims 25 and 77-80, the rAAV vector of claim 26 or 84, or the rAAV particle of any one of claims 27, 28 and 85.

87. The cell of claim 86, wherein the cell is a mammalian cell.

88. The cell of claim 86 or 87, wherein the cell is a human cell.
